United States Patent Application Publication US 2026/0234590 A1, published August 13, 2026 (application 19/153,026).

The application's sequence listing, which the Patent Office published only in electronic form, follows.

SEQUENCE LISTING (1648 sequences)

SEQ ID NO: 1 - DNA, 1614 bp, synthetic construct
  misc_feature 1..1614: note = B-Glucocerebrosidase from Homo Sapiens
  source 1..1614: mol_type = other DNA
atggagttttcttctcctagtagagaagaatgccccaagccactgagcagggtgagcatcatggctggctccctcacagggctgcttcttttgcaggcagtctcatgggcctctggagccaggccctgtattcccaagtcattcggctactcctcagtggtgtgtgtatgcaatgccacctattgtgacagttttgatcctccaactttccctgctctgggtaccttctcccggtatgagagcacaagaagtggaagacgcatggagctctcaatgggcccaatacaggctaaccacactgggacaggtctgctgctgaccctccaacctgaacagaagtttcagaaagtcaagggatttggaggagccatgactgatgcagcagcactcaacatcttggccctgtctccaccagcccagaatctgctgttgaagtcctacttctcagaggaggggattggctacaacatcatccgggttcccatggctagctgtgacttctccattaggacctatacatacgctgacacccccgatgattttcagctccataatttcagtctccctgaagaagacaccaaactgaagatacctctgattcacagagccttgcaactggcacaaaggccagtgagcctcttggcttctccctggactagtcctacatggctgaagactaatggtgctgttaatgggaaaggctccctgaaaggacagccaggtgacatctatcatcagacatgggcccgctactttgtgaaattccttgatgcctatgcagagcacaagctccagttctgggcagtcaccgcagaaaacgagccctcagctgggctgctgtctggctacccctttcagtgcttgggctttactcctgagcatcaacgggacttcattgcccgggatttggggccaacactggccaacagcacccaccacaatgtaagactcctcatgctggatgaccagaggctgctgctccctcattgggccaaggtggtgttgacagacccagaagctgccaaatatgttcatggcatcgctgtccactggtacctggattttttggcccctgcaaaggctactctgggagagacccacagactcttccccaacaccatgctgtttgcatcagaagcctgcgtggggagcaaattctgggagcagtctgttaggctgggttcctgggatcggggcatgcaatattcccatagtataataactaacctcctctaccacgtggtaggatggacagactggaatctggctttgaacccagaaggaggccccaattgggtgcgcaactttgttgacagccccatcattgtggatatcacaaaggacaccttctacaaacagcctatgttctatcatctggggcactttagcaagttcattccagagggttcccagagagtaggcttggttgcctcacagaagaatgatctggatgctgtggcactcatgcatcctgacgggagtgcagtggtggtagtactgaacaggtctagcaaagatgttcccttgactatcaaagacccagctgtgggctttctggaaaccatttcccctggatactctatccacacctatctctggagaagacagtaatga

SEQ ID NO: 2 - protein, 536 aa, Homo sapiens
  REGION 1..536: note = B-Glucocerebrosidase from Homo Sapiens
MEFSSPSREECPKPLSRVSIMAGSLTGLLLLQAVSWASGARPCIPKSFGYSSVVCVCNATYCDSFDPPTFPALGTFSRYESTRSGRRMELSMGPIQANHTGTGLLLTLQPEQKFQKVKGFGGAMTDAAALNILALSPPAQNLLLKSYFSEEGIGYNIIRVPMASCDFSIRTYTYADTPDDFQLHNFSLPEEDTKLKIPLIHRALQLAQRPVSLLASPWTSPTWLKTNGAVNGKGSLKGQPGDIYHQTWARYFVKFLDAYAEHKLQFWAVTAENEPSAGLLSGYPFQCLGFTPEHQRDFIARDLGPTLANSTHHNVRLLMLDDQRLLLPHWAKVVLTDPEAAKYVHGIAVHWYLDFLAPAKATLGETHRLFPNTMLFASEACVGSKFWEQSVRLGSWDRGMQYSHSIITNLLYHVVGWTDWNLALNPEGGPNWVRNFVDSPIIVDITKDTFYKQPMFYHLGHFSKFIPEGSQRVGLVASQKNDLDAVALMHPDGSAVVVVLNRSSKDVPLTIKDPAVGFLETISPGYSIHTYLWRRQ

SEQ ID NO: 3 - DNA, 1614 bp, synthetic construct
  misc_feature 1..1614: note = Variant of B-Glucocerebrosidase
  source 1..1614: mol_type = other DNA
atggagttttcttctcctagtagagaagaatgccccaagccactgagcagggtgagcatcatggctggctccctcacagggctgcttcttttgcaggcagtctcatgggcctctggagccaggccctgtattcccaagtcattcggctactcctcagtggtgtgtgtatgcaatgccacctattgtgacagttttgatcctccaactttccctgctctgggtaccttctcccggtatgagagcacaagaagtggaagacgcatggagctctcaatgggcccaatacaggctaaccacactgggacaggtctgctgctgaccctccaacctgaacagaagtttcagaaagtcaagggatttggaggagccatgactgatgcagcagcactcaacatcttggccctgtctccaccagcccagaatctgctgttgaagtcctacttctcagaggaggggattggctacaacatcatccgggttcccatggctagctgtgacttctccattaggacctatacatacgctgacacccccgatgattttcagctccataatttcagtctccctgaagaagacaccaaactgaagatacctctgattcacagagccttgcaactggcacaaaggccagtgagcctcttggcttctccctggactagtcctacatggctgaagactaatggtgctgttaatgggaaaggctccctgaaaggacagccaggtgacatctatcatcagacatgggcccgctactttgtgaaattccttgatgcctatgcagagcacaagctcacattctgggcagtcaccgcagaaaacgagccctcagctgggctgctgtctggctacccctttcagtgcttgggctttactcctgagcatcaacgggacttcattgcccgggatttggggccaacactggccaacagcacccaccacaatgtaagactcctcatgctggatgaccagaggctgctgctccctcattgggccaaggtggtgttgacagacccagaagctgccaaatatgttcatggcatcgctgtccactggtacctggattttttggcccctgcaaaggctactctgggagagacccacagactcttccccgataccatgctgtttgcatcagaagcctgcgtggggagcaaattctgggagcagtctgttaggctgggttcctgggatcggggcatgcaatattcccatagtataataactaacctcctctaccacgtggtaggatggacagactggaatctggctttgaacccagaaggaggccccaattgggtgcgcaactttgttgacagccccatcattgtggatatcacaaaggacaccttctacaaacagcctatgttctatcatctggggcactttagcaagttcattccagagggttcccagagagtaggcttggttgcctcacagaagaatgatctggatgctgtggcactcctgcatcctgacgggagtgcagtggtggtagtactgaacaggtctagcaaagatgttcccttgactatcaaagacccagctgtgggctttctggaaaccatttcccctggatactctatccacacctatctctggagaagacagtaatga

SEQ ID NO: 4 - protein, 536 aa, synthetic construct
  REGION 1..536: note = Variant of B-Glucocerebrosidase
MEFSSPSREECPKPLSRVSIMAGSLTGLLLLQAVSWASGARPCIPKSFGYSSVVCVCNATYCDSFDPPTFPALGTFSRYESTRSGRRMELSMGPIQANHTGTGLLLTLQPEQKFQKVKGFGGAMTDAAALNILALSPPAQNLLLKSYFSEEGIGYNIIRVPMASCDFSIRTYTYADTPDDFQLHNFSLPEEDTKLKIPLIHRALQLAQRPVSLLASPWTSPTWLKTNGAVNGKGSLKGQPGDIYHQTWARYFVKFLDAYAEHKLTFWAVTAENEPSAGLLSGYPFQCLGFTPEHQRDFIARDLGPTLANSTHHNVRLLMLDDQRLLLPHWAKVVLTDPEAAKYVHGIAVHWYLDFLAPAKATLGETHRLFPDTMLFASEACVGSKFWEQSVRLGSWDRGMQYSHSIITNLLYHVVGWTDWNLALNPEGGPNWVRNFVDSPIIVDITKDTFYKQPMFYHLGHFSKFIPEGSQRVGLVASQKNDLDAVALLHPDGSAVVVVLNRSSKDVPLTIKDPAVGFLETISPGYSIHTYLWRRQ

SEQ ID NO: 5 - DNA, 1614 bp, synthetic construct
  misc_feature 1..1614: note = Variant of B-Glucocerebrosidase
  source 1..1614: mol_type = other DNA
atggagttttcttctcctagtagagaagaatgccccaagccactgagcagggtgagcatcatggctggatccctcacagggctgcttcttttgcaggcagtctcatgggcctctggagccaggccctgtattcccaagtcattcggctactcctcagtggtgtgtgtatgcaatgccacctattgtgacagttttgatcctccaactttccctgctctgggtaccttctcccggtatgagagcacaagaagtggaagacgcatggagctctcaatgggcccaatacaggctaaccacactgggacaggtctgctgctgaccctccagcctgaacagaagtttcagaaagtcaagggatttggaggagccatgactgatgcagcagcactcaacatcttggccctgtctccaccagcccagaatctgctgttgaagtcctacttctcagaggaggggattggctacaacatcatccgggttcccatggctagctgtgacttctccattaggacctatacatacgctgacacccccgatgattttcagctccataatttcagtctccctgaagaagacaccaaactgaagatacctctgattcacagagccttgcaactggcacaaaggccagtgagcctcttggcttctccctggactagtcctacatggctgaagactaatggtgctgttaatgggaaaggctccctgaaaggacagccaggtgacaaatatcatcagacatgggcccgctactttgtgaaattccttgatgcctatgcagagcacaagctccaattctgggcagtcaccgcagaaaacgagccctcagctgggctgctgtctggctacccctttcagtgcttgggctttactcctgagcatcaacgggacttcattgcccgggatttggggccaacactggccaacagcacccaccacaatgtaagactcctcatgctggatgaccagaggctgctgctccctcattgggccaaggtggtgttgacagacccagaagctgccaaatatgttcatggcatcgctgtccactggtacctggattttttggcccctgcaaaggctactctgggagagacccacagactcttccccaataccatgctgtttgcatcagaagcctgcgtggggagcaaattctgggagcagtctgttaggctgggttcctgggatcggggcatgcaatattcccatagtataataactaacctcctctaccacgtggtaggatggacagactggaatctggctttgaacccagaaggaggccccaattgggtgcgcaactttgttgacagccccatcattgtggatatcacaaaggacaccttctacaaacagcctatgttctatcatctggggcactttagcaagttcattccagagggttcccagagagtaggcttggttgcctcacagaagaatgatctggatgctgtggcactcatgcatcctgacgggagtgcagtggtggtagtactgaacaggtctagcaaagatgttcccttgactatcaaagacccagctgtgggctttctggaaaccatttcccctggatactctatccacacctatctctggagaagacagtaatga

SEQ ID NO: 6 - protein, 536 aa, synthetic construct
  REGION 1..536: note = Variant of B-Glucocerebrosidase
MEFSSPSREECPKPLSRVSIMAGSLTGLLLLQAVSWASGARPCIPKSFGYSSVVCVCNATYCDSFDPPTFPALGTFSRYESTRSGRRMELSMGPIQANHTGTGLLLTLQPEQKFQKVKGFGGAMTDAAALNILALSPPAQNLLLKSYFSEEGIGYNIIRVPMASCDFSIRTYTYADTPDDFQLHNFSLPEEDTKLKIPLIHRALQLAQRPVSLLASPWTSPTWLKTNGAVNGKGSLKGQPGDKYHQTWARYFVKFLDAYAEHKLQFWAVTAENEPSAGLLSGYPFQCLGFTPEHQRDFIARDLGPTLANSTHHNVRLLMLDDQRLLLPHWAKVVLTDPEAAKYVHGIAVHWYLDFLAPAKATLGETHRLFPNTMLFASEACVGSKFWEQSVRLGSWDRGMQYSHSIITNLLYHVVGWTDWNLALNPEGGPNWVRNFVDSPIIVDITKDTFYKQPMFYHLGHFSKFIPEGSQRVGLVASQKNDLDAVALMHPDGSAVVVVLNRSSKDVPLTIKDPAVGFLETISPGYSIHTYLWRRQ

SEQ ID NO: 7 - DNA, 1614 bp, synthetic construct
  misc_feature 1..1614: note = Variant of B-Glucocerebrosidase
  source 1..1614: mol_type = other DNA
atggagttttcttctcctagtagagaagaatgccccaagccactgagcagggtgagcatcatggctgcatccctcacagggctgcttcttttgcaggcagtctcatgggcctctggagccaggccctgtattcccaagtcattcggctactcctcagtggtgtgtgtatgcaatgccacctattgtgacagtttcgatcctccaactttccctgctctgggtaccttctcccggtatgagagcacaagaagtggaagacgcatggagctctcaatgggccctatacaggctaaccacactgggacaggtctgctgctgaccctccaacctgaacagaagtttcagaaagtcaagggatttggaggagccatgactgatgcagcagcactcaacatcttggccctgtctccaccagcccagaatctgctgttgaagtcctacttctcagaggaggggattggctacaacatcatccgggttcccatggctagctgtgacttctccattaggacctatacatacgctgacacccccgatgattttcagctccataatttcagtctccctgaagaagacaccaaactgaagatacctctgattcacagagccttgcaactggcacaaaggccagtgagcctcttggcttctccctggactagtcctacatggctgaagactaatggtgctgttaatgggaaaggctccctgaaaggacagccaggtgacatctatcatcagacatgggcccgctactttgtgaaattccttgatgcctatgcagagcacaagctccaattctgggcagtcaccgcagaaaacgagccctcagctgggctgctgtctggctacccctttcagtgcttgggctttactcctgagcatcaacgggacttcattgcccgggatttggggccaacactggccaacagcacccaccacaatgtaagactcctcatgctggatgaccagaggctgctgctccctcattgggccaaggtggtgttgacagacccagaagctgccaaatatgttcatggcatcgctgtccactggtacctggattttttggcccctgcaaaggctactctgggagagacccacagactcttccccaacaccatgctgtttgcatcagaagcctgcgtggggagcaaattctgggagcagtctgttaggctgggttcctgggatcggggcatgcaatattcccatagtataataactaacctcctctaccacgtggtaggatggacagactggaatctggctttgaacccagaaggaggccccaattgggtgcgcaactttgttgacagccccatcattgtggatatcacaaaggacaccttctacaaacagcctatgttctatcatctggggcactttagcaagttcattccagagggttcccagagagtaggcttggttgcctcacagaagaatgatctggatgctgtggcactcatgcatcctgacgggagtgcagtggtggtagtactgaacaggtctagcaaagatgttcccttgactatcaaagacccagctgtgggctttctggaaaccatttcccctggatactctatccacacctatctctggagaagacagtaatga

SEQ ID NO: 8 - protein, 536 aa, synthetic construct
  REGION 1..536: note = Variant of B-Glucocerebrosidase
MEFSSPSREECPKPLSRVSIMAASLTGLLLLQAVSWASGARPCIPKSFGYSSVVCVCNATYCDSFDPPTFPALGTFSRYESTRSGRRMELSMGPIQANHTGTGLLLTLQPEQKFQKVKGFGGAMTDAAALNILALSPPAQNLLLKSYFSEEGIGYNIIRVPMASCDFSIRTYTYADTPDDFQLHNFSLPEEDTKLKIPLIHRALQLAQRPVSLLASPWTSPTWLKTNGAVNGKGSLKGQPGDIYHQTWARYFVKFLDAYAEHKLQFWAVTAENEPSAGLLSGYPFQCLGFTPEHQRDFIARDLGPTLANSTHHNVRLLMLDDQRLLLPHWAKVVLTDPEAAKYVHGIAVHWYLDFLAPAKATLGETHRLFPNTMLFASEACVGSKFWEQSVRLGSWDRGMQYSHSIITNLLYHVVGWTDWNLALNPEGGPNWVRNFVDSPIIVDITKDTFYKQPMFYHLGHFSKFIPEGSQRVGLVASQKNDLDAVALMHPDGSAVVVVLNRSSKDVPLTIKDPAVGFLETISPGYSIHTYLWRRQ

SEQ ID NO: 9 - DNA, 1614 bp, synthetic construct
  misc_feature 1..1614: note = Variant of B-Glucocerebrosidase
  source 1..1614: mol_type = other DNA
atggagttttcttctcctagtagagaagaatgccccaagccactgagcagggtgagcatcatggctggatccctcacagggctgcttcttttgcaggcagtctcatgggcctctggagccaggccctgtattcccaagtcattcggctactcctcagtggtgtgtgtatgcaatgccacctattgtgacagttttgatcctccaactttccctgctctgggtaccttctcccggtatgagagcacaagaagtggaagacgcatggagctctcaatgggcccaatacaggctaaccacactgggacaggtctgctgctgaccctcgaccctgaacagaagtttcagaaagtcaagggatttggaggagccatgactgatgcagcagcactcaacatcttggccctgtctccaccagcccagaatctgctgttgaagtcctacttctcagaggaggggattggctacaacatcatccgggttcccatggctagctgtgacttctccattaggacctatacatacgctgacacccccgatgattttcagctccataatttcagtctccctgaagaagacaccaaactgaagatacctctgattcacagagccttgcaactggcacaaaggccagtgagcctcttggcttctccctggactagtcctacatggctgaagactaatggtgctgttaatgggaaaggctccctgaaaggacagccaggtgacatatatcatcagacatgggcccgctactttgtgaaattccttgatgcctatgcagagcacaagctccaattctgggcagtcaccgcagaaaacgagccctcagctgggctgctgtctggctacccctttcagtgcttgggctttactcctgagcatcaacgggacttcattgcccgggatttggggccaacactggccaacagcacccaccacaatgtaagactcctcatgctggatgaccagaggctgctgctccctcattgggccaaggtggtgttgacagacccagaagctgccaaatatgttcatggcatcgctgtccactggtacctggattttttggcccctgcaaaggctactctgggagagacccacagactcttccccaataccatgctgtttgcatcagaagcctgcgtggggagcaaattctgggagcagtctgttaggctgggttcctgggatcggggcatgcaatattcccatagtataataactaacctcctctaccacgtggtaggatggacagactggaatctggctttgaacccagaaggaggccccaattgggtgcgcaactttgttgacagccccatcattgtggatatcacaaaggacaccttctacaaacagcctatgttctatcatctggggcactttagcaagttcattccagagggttcccagagagtaggcttggttgcctcacagaagaatgatctggatgctgtggcactcatgcatcctgacgggagtgcagtggtggtagtactgaacaggtctagcaaagatgttcccttgactatcaaagacccagctgtgggctttctggaaaccatttcccctggatactctatccacacctatctctggagaagacagtaatga

SEQ ID NO: 10 - protein, 536 aa, synthetic construct
  REGION 1..536: note = Variant of B-Glucocerebrosidase
MEFSSPSREECPKPLSRVSIMAGSLTGLLLLQAVSWASGARPCIPKSFGYSSVVCVCNATYCDSFDPPTFPALGTFSRYESTRSGRRMELSMGPIQANHTGTGLLLTLDPEQKFQKVKGFGGAMTDAAALNILALSPPAQNLLLKSYFSEEGIGYNIIRVPMASCDFSIRTYTYADTPDDFQLHNFSLPEEDTKLKIPLIHRALQLAQRPVSLLASPWTSPTWLKTNGAVNGKGSLKGQPGDIYHQTWARYFVKFLDAYAEHKLQFWAVTAENEPSAGLLSGYPFQCLGFTPEHQRDFIARDLGPTLANSTHHNVRLLMLDDQRLLLPHWAKVVLTDPEAAKYVHGIAVHWYLDFLAPAKATLGETHRLFPNTMLFASEACVGSKFWEQSVRLGSWDRGMQYSHSIITNLLYHVVGWTDWNLALNPEGGPNWVRNFVDSPIIVDITKDTFYKQPMFYHLGHFSKFIPEGSQRVGLVASQKNDLDAVALMHPDGSAVVVVLNRSSKDVPLTIKDPAVGFLETISPGYSIHTYLWRRQ

SEQ ID NO: 11 - DNA, 1614 bp, synthetic construct
  misc_feature 1..1614: note = Variant of B-Glucocerebrosidase
  source 1..1614: mol_type = other DNA
atggagttttcttctcctagtagagaagaatgccccaagccactgagcagggtgagcatcatggctggatccctcacagggctgcttcttttgcaggcagtctcatgggcctctggagccaggccctgtattcccaagtcattcggctactcctcagtggtgtgtgtatgcaatgccacctattgtgacagttttgatcctccaactttccctgctctgggtaccttctcccggtatgagagcacaagaagtggaagacgcatggagctctcaatgggcccaatacaggctaaccacactgggacaggtctgctgctgaccctccagcctgaacagaagtttcagaaagtcaagggatttggaggagccatgactgatgcagcagcactcaacatcttggccctgtctccaccagcccagaatctgctgttgaagtcctacttctcagaggaggggattggctacaacatcatccgggttcccatggctagctgtgacttctccattaggacctatacatacgctgacacccccgatgattttcagctccataatttcagtctccctgaagaagacaccaaactgaagatacctctgattcacagagccttgcaactggcacaaaggccagtgagcctcttggcttctccctggactagtcctacatggctgaagactaatggtgctgttaatgggaaaggctccctgaaaggacagccaggtgacatctatcatcagacatgggcccgctactttgtgaaattccttgatgcctatgcagagcacaagctcacattctgggcagtcaccgcagaaaacgagccctcagctgggctgctgtctggctacccctttcagtgcttgggctttactcctgagcatcaacgggacttcattgcccgggatttggggccaacactggccaacagcacccaccacaatgtaagactcctcatgctggatgaccagaggctgctgctccctcattgggccaaggtggtgttgacagacccagaagctgccaaatatgttcatggcatcgctgtccactggtacctggattttttggcccctgcaaaggctactctgggagagacccacagactcttccccaacaccatgctgtttgcatcagaagcctgcgtggggagcaaattctgggagcagtctgttaggctgggttcctgggatcggggcatgcaatattcccatagtataataactaacctcctctaccacgtggtaggatggacagactggaatctggctttgaacccagaaggaggccccaattgggtgcgcaactttgttgacagccccatcattgtggatatcacaaaggacaccttctacaaacagcctatgttctatcatctggggcactttagcaagttcattccagagggttcccagagagtaggcttggttgcctcacagaagaatgatctggatgctgtggcactcatgcatcctgacgggagtgcagtggtggtagtactgaacaggtctagcaaagatgttcccttgactatcaaagacccagctgtgggctttctggaaaccatttcccctggatactctatccacacctatctctggagaagacagtaatga

SEQ ID NO: 12 - protein, 536 aa, synthetic construct
  REGION 1..536: note = Variant of B-Glucocerebrosidase
MEFSSPSREECPKPLSRVSIMAGSLTGLLLLQAVSWASGARPCIPKSFGYSSVVCVCNATYCDSFDPPTFPALGTFSRYESTRSGRRMELSMGPIQANHTGTGLLLTLQPEQKFQKVKGFGGAMTDAAALNILALSPPAQNLLLKSYFSEEGIGYNIIRVPMASCDFSIRTYTYADTPDDFQLHNFSLPEEDTKLKIPLIHRALQLAQRPVSLLASPWTSPTWLKTNGAVNGKGSLKGQPGDIYHQTWARYFVKFLDAYAEHKLTFWAVTAENEPSAGLLSGYPFQCLGFTPEHQRDFIARDLGPTLANSTHHNVRLLMLDDQRLLLPHWAKVVLTDPEAAKYVHGIAVHWYLDFLAPAKATLGETHRLFPNTMLFASEACVGSKFWEQSVRLGSWDRGMQYSHSIITNLLYHVVGWTDWNLALNPEGGPNWVRNFVDSPIIVDITKDTFYKQPMFYHLGHFSKFIPEGSQRVGLVASQKNDLDAVALMHPDGSAVVVVLNRSSKDVPLTIKDPAVGFLETISPGYSIHTYLWRRQ

SEQ ID NO: 13 - DNA, 1614 bp, synthetic construct
  misc_feature 1..1614: note = Variant of B-Glucocerebrosidase
  source 1..1614: mol_type = other DNA
atggagttttcttctcctagtagagaagaatgccccaagccactgagcagggtgagcatcatggctggatccctcacagggctgcttcttttgcaggcagtctcatgggcctctggagccaggccctgtattcccaagtcattcggctactcctcagtggtgtgtgtatgcaatgccacctattgtgacagttttgatcctccaactttccctgctctgggtaccttctcccggtatgagagcacaagaagtggaagacgcatggagctctcaatgggcccaatacaggctaaccacactgggacaggtctgctgctgaccctcgaccctgaacagaagtttcagaaagtcaagggatttggaggagccatgactgatgcagcagcactcaacatcttggccctgtctccaccagcccagaatctgctgttgaagtcctacttctcagaggaggggattggctacaacatcatccgggttcccatggctagctgtgacttctccattaggacctatacatacgctgacacccccgatgattttcagctccataatttcagtctccctgaagaagacaccaaaatgaagatacctctgattcacagagccttgcaactggcacaaaggccagtgagcctcttggcttctccctggactagtcctacatggctgaagactaatggtgctgttaatgggaaaggctccctgaaaggacagccaggtgacaaatatcatcagacatgggcccgctactttgtgaaattccttgatgcctatgcagagcacaagctccagttctgggcagtcaccgcagaaaacgagccctcagctgggctgctgtctggctacccctttcagtgcttgggctttactcctgagcatcaacgggacttcattgcccgggatttggggccaacactggccaacagcacccaccacaatgtaagactcctcatgctggatgaccagaggctgctgctccctcattgggccaaggtggtgttgacagacccagaagctgccaaatatgttcatggcatcgctgtccactggtacctggattttttggcccctgcaaaggctactctgggagagacccacagactcttccccaacaccatgctgtttgcatcagaagcctgcgtggggagcaaattctgggagcagtctgttaggctgggttcctgggatcggggcatgcaatattcccatagtataataactaacctcctctaccacgtggtaggatggacagactggaatctggctttgaacccagaaggaggccccaattgggtgcgcaactttgttgacagccccatcattgtggatatcacaaaggacaccttctacaaacagcctatgttctatcatctggggcactttagcaagttcattccagagggttcccagagagtaggcttggttgcctcacagaagaatgatctggatgctgtggcactcatgcatcctgacgggagtgcagtggtggtagtactgaacaggtctagcaaagatgttcccttgactatcaaagacccagctgtgggctttctggaaaccatttcccctggatactctatccacacctatctctggagaagacagtaatga

SEQ ID NO: 14 - protein, 536 aa, synthetic construct
  REGION 1..536: note = Variant of B-Glucocerebrosidase
MEFSSPSREECPKPLSRVSIMAGSLTGLLLLQAVSWASGARPCIPKSFGYSSVVCVCNATYCDSFDPPTFPALGTFSRYESTRSGRRMELSMGPIQANHTGTGLLLTLDPEQKFQKVKGFGGAMTDAAALNILALSPPAQNLLLKSYFSEEGIGYNIIRVPMASCDFSIRTYTYADTPDDFQLHNFSLPEEDTKMKIPLIHRALQLAQRPVSLLASPWTSPTWLKTNGAVNGKGSLKGQPGDKYHQTWARYFVKFLDAYAEHKLQFWAVTAENEPSAGLLSGYPFQCLGFTPEHQRDFIARDLGPTLANSTHHNVRLLMLDDQRLLLPHWAKVVLTDPEAAKYVHGIAVHWYLDFLAPAKATLGETHRLFPNTMLFASEACVGSKFWEQSVRLGSWDRGMQYSHSIITNLLYHVVGWTDWNLALNPEGGPNWVRNFVDSPIIVDITKDTFYKQPMFYHLGHFSKFIPEGSQRVGLVASQKNDLDAVALMHPDGSAVVVVLNRSSKDVPLTIKDPAVGFLETISPGYSIHTYLWRRQ

SEQ ID NO: 15 - DNA, 1614 bp, synthetic construct
  misc_feature 1..1614: note = Variant of B-Glucocerebrosidase
  source 1..1614: mol_type = other DNA
atggagttttcttctcctagtagagaagaatgccccaagccactgagcagggtgagcatcatggctgcatccctcacagggctgcttcttttgcaggcagtctcatgggcctctggagccaggccctgtattcccaagtcattcggctactcctcagtggtgtgtgtatgcaatgccacctattgtgacagtttcgatcctccaactctccctgctctgggtaccttctcccggtatgagagcacaagaagtggaagacgcatggagctctcaatgggccctatacaggctaaccacactgggacaggtctgctgctgaccctccagcctgaacagaagtttcagaaagtcaagggatttggaggagccatgactgatgcagcagcactcaacatcttggccctgtctccaccagcccagaatctgctgttgaagtcctacttctcagaggaggggattggctacaacatcatccgggttcccatggctagctgtgacttctccattaggacctatacatacgctgacacccccgatgattttcagctccataatttcagtctccctgaagaagacaccaaactgaagatacctctgattcacagagccttgcaactgtcccaaaggccagtgagcctcttcgcttctccctggactagtcctacatggctgaagactaatggtgctgttaatgggaaaggctccctgaaaggacagccaggtgacatatatcatcagacatgggcccgctactttgtgaaattccttgatgcctatgcagagcacaagctcacattctgggcagtcaccgcagaaaacgagccctcagctgggctgctgtctggctacccctttcagtgcttgggctttactcctgagcatcaacgggacttcattgcccgggatttggggccaacactggccaacagcacccaccacaatgtaagactcctcatgctggatgaccagaggctgctgctccctcattgggccaaggtggtgttgacagacccagaagctgccaaatatgttcatggcatcgctgtccactggtacctggattttttggcccctgcaaaggctactctgggagagacccacagactcttccccaacaccatgctgtttgcatcagaagcctgcgtggggagcaaattctgggagcagtctgttaggctgggttcctgggatcggggcatgcaatattcccatagtataataactaacctcctctaccacgtggtaggatggacagactggaatctggctttgaacccagaaggaggccccaattgggtgcgcaactttgttgacagccccatcattgtggatatcacaaaggacaccttctacaaacagcctatgttctatcatctggggcactttagcaagttcattccagagggttcccagagagtaggcttggttgcctcacagaagaatgatctggatgctgtggcactcatgcatcctgacgggagtgcagtggtggtagtactgaacaggtctagcaaagatgttcccttgactatcaaagacccagctgtgggctttctggaaaccatttcccctggatactctatccacacctatctctggagaagacagtaatga

SEQ ID NO: 16 - protein, 536 aa, synthetic construct
  REGION 1..536: note = Variant of B-Glucocerebrosidase
MEFSSPSREECPKPLSRVSIMAASLTGLLLLQAVSWASGARPCIPKSFGYSSVVCVCNATYCDSFDPPTLPALGTFSRYESTRSGRRMELSMGPIQANHTGTGLLLTLQPEQKFQKVKGFGGAMTDAAALNILALSPPAQNLLLKSYFSEEGIGYNIIRVPMASCDFSIRTYTYADTPDDFQLHNFSLPEEDTKLKIPLIHRALQLSQRPVSLFASPWTSPTWLKTNGAVNGKGSLKGQPGDIYHQTWARYFVKFLDAYAEHKLTFWAVTAENEPSAGLLSGYPFQCLGFTPEHQRDFIARDLGPTLANSTHHNVRLLMLDDQRLLLPHWAKVVLTDPEAAKYVHGIAVHWYLDFLAPAKATLGETHRLFPNTMLFASEACVGSKFWEQSVRLGSWDRGMQYSHSIITNLLYHVVGWTDWNLALNPEGGPNWVRNFVDSPIIVDITKDTFYKQPMFYHLGHFSKFIPEGSQRVGLVASQKNDLDAVALMHPDGSAVVVVLNRSSKDVPLTIKDPAVGFLETISPGYSIHTYLWRRQ

SEQ ID NO: 17 - DNA, 1614 bp, synthetic construct
  misc_feature 1..1614: note = Variant of B-Glucocerebrosidase
  source 1..1614: mol_type = other DNA
atggagttttcttctcctagtagagaagaatgccccaagccactgagcagggtgagcatcatggctgcatccctcacagggctgcttcttttgcaggcagtctcatgggcctctggagccaggccctgtattcccaagtcattcggctactcctcagtggtgtgtgtatgcaatgccacctattgtgacagtttcgatcctccaactctccctgctctgggtaccttctcccggtatgagagcacaagaagtggaagacgcatggagctctcaatgggccctatacaggctaaccacactgggacaggtctgctgctgaccctccaacctgaacagaagtttcagaaagtcaagggatttggaggagccatgactgatgcagcagcactcaacatcttggccctgtctccaccagcccagaatctgctgttgaagtcctacttctcagaggaggggattggctacaacatcatccgggttcccatggctagctgtgacttctccattaggacctatacatacgctgacacccccgatgattttcagctccataatttcagtctccctgaagaagacaccaaactgaagatacctctgattcacagagccttgcaactggcacaaaggccagtgagcctcttggcttctccctggactagtcctacatggctgaagactaatggtgctgttaatgggaaaggctccctgaaaggacagccaggtgacatatatcatcagacatgggcccgctactttgtgaaattccttgatgcctatgcagagcacaagctccaattctgggcagtcaccgcagaaaacgagccctcagctgggctgctgtctggctacccctttcagtgcttgggctttactcctgagcatcaacgggacttcattgcccgggatttggggccaacactggccaacagcacccaccacaatgtaagactcctcatgctggatgaccagaggctgctgctccctcattgggccaaggtggtgttgacagacccagaagctgccaaatatgttcatggcatcgctgtccactggtacctggattttttggcccctgcaaaggctactctgggagagacccacagactcttccccaataccatgctgtttgcatcagaagcctgcgtggggagcaaattctgggagcagtctgttaggctgggttcctgggatcggggcatgcaatattcccatagtataataactaacctcctctaccacgtggtaggatggacagactggaatctggctttgaacccagaaggaggccccaattgggtgcgcaactttgttgacagccccatcattgtggatatcacaaaggacaccttctacaaacagcctatgttctatcatctggggcactttagcaagttcattccagagggttcccagagagtaggcttggttgcctcacagaagaatgatctggatgctgtggcactcatgcatcctgacgggagtgcagtggtggtagtactgaacaggtctagcaaagatgttcccttgactatcaaagacccagctgtgggctttctggaaaccatttcccctggatactctatccacacctatctctggagaagacagtaatga

SEQ ID NO: 18 - protein, 536 aa, synthetic construct
  REGION 1..536: note = Variant of B-Glucocerebrosidase
MEFSSPSREECPKPLSRVSIMAASLTGLLLLQAVSWASGARPCIPKSFGYSSVVCVCNATYCDSFDPPTLPALGTFSRYESTRSGRRMELSMGPIQANHTGTGLLLTLQPEQKFQKVKGFGGAMTDAAALNILALSPPAQNLLLKSYFSEEGIGYNIIRVPMASCDFSIRTYTYADTPDDFQLHNFSLPEEDTKLKIPLIHRALQLAQRPVSLLASPWTSPTWLKTNGAVNGKGSLKGQPGDIYHQTWARYFVKFLDAYAEHKLQFWAVTAENEPSAGLLSGYPFQCLGFTPEHQRDFIARDLGPTLANSTHHNVRLLMLDDQRLLLPHWAKVVLTDPEAAKYVHGIAVHWYLDFLAPAKATLGETHRLFPNTMLFASEACVGSKFWEQSVRLGSWDRGMQYSHSIITNLLYHVVGWTDWNLALNPEGGPNWVRNFVDSPIIVDITKDTFYKQPMFYHLGHFSKFIPEGSQRVGLVASQKNDLDAVALMHPDGSAVVVVLNRSSKDVPLTIKDPAVGFLETISPGYSIHTYLWRRQ

SEQ ID NO: 19 - DNA, 1614 bp, synthetic construct
  misc_feature 1..1614: note = Variant of B-Glucocerebrosidase
  source 1..1614: mol_type = other DNA
atggagttttcttctcctagtagagaagaatgccccaagccactgagcagggtgagcatcatggctgcatccctcacagggctgcttcttttgcaggcagtctcatgggcctctggagccaggccctgtattcccaagtcattcggctactcctcagtggtgtgtgtatgcaatgccacctattgtgacagttttgatcctccaactttccctgctctgggtaccttctcccggtatgagagcacaagaagtggaagacgcatggagctctcaatgggcccaatacaggctaaccacactgggacaggtctgctgctgaccctccaacctgaacagaagtttcagaaagtcaagggatttggaggagccatgactgatgcagcagcactcaacatcttggccctgtctccaccagcccagaatctgctgttgaagtcctacttctcagaggaggggattggctacaacatcatccgggttcccatggctagctgtgacttctccattaggacctatacatacgctgacacccccgatgattttcagctccataatttcagtctccctgaagaagacaccaaactgaagatacctctgattcacagagccttgcaactggcacaaaggccagtgagcctcttcgcttctccctggactagtcctacatggctgaagactaatggtgctgttaatgggaaaggctccctgaaaggacagccaggtgacaaatatcatcagacatgggcccgctactttgtgaaattccttgatgcctatgcagagcacaagctcacattctgggcagtcaccgcagaaaacgagccctcagctgggctgctgtctggctacccctttcagtgcttgggctttactcctgagcatcaacgggacttcattgcccgggatttggggccaacactggccaacagcacccaccacaatgtaagactcctcatgctggatgaccagaggctgctgctccctcattgggccaaggtggtgttgacagacccagaagctgccaaatatgttcatggcatcgctgtccactggtacctggattttttggcccctgcaaaggctactctgggagagacccacagactcttccccaacaccatgctgtttgcatcagaagcctgcgtggggagcaaattctgggagcagtctgttaggctgggttcctgggatcggggcatgcaatattcccatagtataataactaacctcctctaccacgtggtaggatggacagactggaatctggctttgaacccagaaggaggccccaattgggtgcgcaactttgttgacagccccatcattgtggatatcacaaaggacaccttctacaaacagcctatgttctatcatctggggcactttagcaagttcattccagagggttcccagagagtaggcttggttgcctcacagaagaatgatctggatgctgtggcactcatgcatcctgacgggagtgcagtggtggtagtactgaacaggtctagcaaagatgttcccttgactatcaaagacccagctgtgggctttctggaaaccatttcccctggatactctatccacacctatctctggagaagacagtaatga

SEQ ID NO: 20 - protein, 536 aa, synthetic construct
  REGION 1..536: note = Variant of B-Glucocerebrosidase
MEFSSPSREECPKPLSRVSIMAASLTGLLLLQAVSWASGARPCIPKSFGYSSVVCVCNATYCDSFDPPTFPALGTFSRYESTRSGRRMELSMGPIQANHTGTGLLLTLQPEQKFQKVKGFGGAMTDAAALNILALSPPAQNLLLKSYFSEEGIGYNIIRVPMASCDFSIRTYTYADTPDDFQLHNFSLPEEDTKLKIPLIHRALQLAQRPVSLFASPWTSPTWLKTNGAVNGKGSLKGQPGDKYHQTWARYFVKFLDAYAEHKLTFWAVTAENEPSAGLLSGYPFQCLGFTPEHQRDFIARDLGPTLANSTHHNVRLLMLDDQRLLLPHWAKVVLTDPEAAKYVHGIAVHWYLDFLAPAKATLGETHRLFPNTMLFASEACVGSKFWEQSVRLGSWDRGMQYSHSIITNLLYHVVGWTDWNLALNPEGGPNWVRNFVDSPIIVDITKDTFYKQPMFYHLGHFSKFIPEGSQRVGLVASQKNDLDAVALMHPDGSAVVVVLNRSSKDVPLTIKDPAVGFLETISPGYSIHTYLWRRQ

SEQ ID NO: 21 - DNA, 1614 bp, synthetic construct
  misc_feature 1..1614: note = Variant of B-Glucocerebrosidase
  source 1..1614: mol_type = other DNA
atggagttttcttctcctagtagagaagaatgccccaagccactgagcagggtgagcatcatggctggatccctcacagggctgcttcttttgcaggcagtctcatgggcctctggagccaggccctgtattcccaagtcattcggctactcctcagtggtgtgtgtatgcaatgccacctattgtgacagtctcgatcctccaactctccctgctctgggtaccttctcccggtatgagagcacaagaagtggaagacgcatggagctctcaatgggcccaatacaggctaaccacactgggacaggtctgctgctgaccctcgaccctgaacagaagtttcagaaagtcaagggatttggaggagccatgactgatgcagcagcactcaacatcttggccctgtctccaccagcccagaatctgctgttgaagtcctacttctcagaggaggggattggctacaacatcatccgggttcccatggctagctgtgacttctccattaggacctatacatacgctgacacccccgatgattttcagctccataatttcagtctccctgaagaagacaccaaactgaagatacctctgattcacagagccttgcaactggcccaaaggccagtgagcctcttcgcttctccctggactagtcctacatggctgaagactaatggtgctgttaatgggaaaggctccctgaaaggacagccaggtgacatatatcatcagacatgggcccgctactttgtgaaattccttgatgcctatgcagagcacaagctccaattctgggcagtcaccgcagaaaacgagccctcagctgggctgctgtctggctacccctttcagtgcttgggctttactcctgagcatcaacgggacttcattgcccgggatttggggccaacactggccaacagcacccaccacaatgtaagactcctcatactggatgaccagaggctgctgctccctcattgggccaaggtggtgttgacagacccagaagctgccaaatatgttcatggcatcgctgtccactggtacctggattttttggcccctgcaaaggctactctgggagagacccacagactcttccccgataccatgctgtttgcatcagaagcctgcgtggggagcaaattctgggagcagtctgttaggctgggttcctgggatcggggcatgcaatattcccatagtataataactaacctcctctaccacgtggtaggatggacagactggaatctggctttgaacccagaaggaggccccaattgggtgcgcaactttgttgacagccccatcattgtggatatcacaaaggacaccttctacaaacagcctatgttctatcatctggggcactttagcaagttcattccagagggttcccagagagtaggcttggttgcctcacagaagactgatctggatgctgtggcactcatgcatcctgacgggagtgcagtggtggtagtactgaacaggtctagcaaagatgttcccttgactatcaaagacccagctgtgggctttctggaaaccatttcccctggatactctatccacacctatctctggagaagacagtaatga

SEQ ID NO: 22 - protein, 536 aa, synthetic construct
  REGION 1..536: note = Variant of B-Glucocerebrosidase
MEFSSPSREECPKPLSRVSIMAGSLTGLLLLQAVSWASGARPCIPKSFGYSSVVCVCNATYCDSLDPPTLPALGTFSRYESTRSGRRMELSMGPIQANHTGTGLLLTLDPEQKFQKVKGFGGAMTDAAALNILALSPPAQNLLLKSYFSEEGIGYNIIRVPMASCDFSIRTYTYADTPDDFQLHNFSLPEEDTKLKIPLIHRALQLAQRPVSLFASPWTSPTWLKTNGAVNGKGSLKGQPGDIYHQTWARYFVKFLDAYAEHKLQFWAVTAENEPSAGLLSGYPFQCLGFTPEHQRDFIARDLGPTLANSTHHNVRLLILDDQRLLLPHWAKVVLTDPEAAKYVHGIAVHWYLDFLAPAKATLGETHRLFPDTMLFASEACVGSKFWEQSVRLGSWDRGMQYSHSIITNLLYHVVGWTDWNLALNPEGGPNWVRNFVDSPIIVDITKDTFYKQPMFYHLGHFSKFIPEGSQRVGLVASQKTDLDAVALMHPDGSAVVVVLNRSSKDVPLTIKDPAVGFLETISPGYSIHTYLWRRQ

SEQ ID NO: 23 - DNA, 1614 bp, synthetic construct
  misc_feature 1..1614: note = Variant of B-Glucocerebrosidase
  source 1..1614: mol_type = other DNA
atggagttttcttctcctagtagagaagaatgccccaagccactgagcagggtgagcatcatggctgcatccctcacagggctgcttcttttgcaggcagtctcatgggcctctggagccaggccctgtattcccaagtcattcggctactcctcagtggtgtgtgtatgcaatgccacctattgtgacagtttcgatcctccaactttccctgctctgggtaccttctcccggtatgagagcacaagaagtggaagacgcatggagctctcaatgggcccaatacaggctaaccacactgggacaggtctgctgctgaccctccaacctgaacagaagtttcagaaagtcaagggatttggaggagccatgactgatgcagcagcactcaacatcttggccctgtctccaccagcccagaatctgctgttgaagtcctacttctcagaggaggggattggctacaacatcatccgggttcccatggctagctgtgacttctccattaggacctatacatacgctgacacccccgatgattttcagctccataatttcagtctccctgaagaagacaccaaactgaagatacctctgattcacagagccttgcaactggcacaaaggccagtgagcctcttggcttctccctggactagtcctacatggctgaagactaatggtgctgttaatgggaaaggctccctgaaaggacagccaggtgacatatatcatcagacatgggcccgctactttgtgaaattccttgatgcctatgcagagcacaagctcacattctgggcagtcaccgcagaaaacgagccctcagctgggctgctgtctggctacccctttcagtgcttgggctttactcctgagcatcaacgggacttcattgcccgggatttggggccaacactggccaacagcacccaccacaatgtaagactcctcatactggatgaccagaggctgctgctccctcattgggccaaggtggtgttgacagacccagaagctgccaaatatgttcatggcatcgctgtccactggtacctggattttttggcccctgcaaaggctactctgggagagacccacagactcttccccaacaccatgctgtttgcatcagaagcctgcgtggggagcaaattctgggagcagtctgttaggctgggttcctgggatcggggcatgcaatattcccatagtataataactaacctcctctaccacgtggtaggatggacagactggaatctggctttgaacccagaaggaggccccaattgggtgcgcaactttgttgacagccccatcattgtggatatcacaaaggacaccttctacaaacagcctatgttctatcatctggggcactttagcaagttcattccagagggttcccagagagtaggcttggttgcctcacagaagaatgatctggatgctgtggcactcatgcatcctgacgggagtgcagtggtggtagtactgaacaggtctagcaaagatgttcccttgactatcaaagacccagctgtgggctttctggaaaccatttcccctggatactctatccacacctatctctggagaagacagtaatga

SEQ ID NO: 24 - protein, 536 aa, synthetic construct
  REGION 1..536: note = Variant of B-Glucocerebrosidase
MEFSSPSREECPKPLSRVSIMAASLTGLLLLQAVSWASGARPCIPKSFGYSSVVCVCNATYCDSFDPPTFPALGTFSRYESTRSGRRMELSMGPIQANHTGTGLLLTLQPEQKFQKVKGFGGAMTDAAALNILALSPPAQNLLLKSYFSEEGIGYNIIRVPMASCDFSIRTYTYADTPDDFQLHNFSLPEEDTKLKIPLIHRALQLAQRPVSLLASPWTSPTWLKTNGAVNGKGSLKGQPGDIYHQTWARYFVKFLDAYAEHKLTFWAVTAENEPSAGLLSGYPFQCLGFTPEHQRDFIARDLGPTLANSTHHNVRLLILDDQRLLLPHWAKVVLTDPEAAKYVHGIAVHWYLDFLAPAKATLGETHRLFPNTMLFASEACVGSKFWEQSVRLGSWDRGMQYSHSIITNLLYHVVGWTDWNLALNPEGGPNWVRNFVDSPIIVDITKDTFYKQPMFYHLGHFSKFIPEGSQRVGLVASQKNDLDAVALMHPDGSAVVVVLNRSSKDVPLTIKDPAVGFLETISPGYSIHTYLWRRQ

SEQ ID NO: 25 - DNA, 1614 bp, synthetic construct
  misc_feature 1..1614: note = Variant of B-Glucocerebrosidase
  source 1..1614: mol_type = other DNA
atggagttttcttctcctagtagagaagaatgccccaagccactgagcagggtgagcatcatggctgcatccctcacagggctgcttcttttgcaggcagtctcatgggcctctggagccaggccctgtattcccaagtcattcggctactcctcagtggtgtgtgtatgcaatgccacctattgtgacagtctcgatcctccaactctccctgctctgggtaccttctcccggtatgagagcacaagaagtggaagacgcatggagctctcaatgggccctatacaggctaaccacactgggacaggtctgctgctgaccctccaacctgaacagaagtttcagaaagtcaagggatttggaggagccatgactgatgcagcagcactcaacatcttggccctgtctccaccagcccaggatctgctgttgaagtcctacttctcagaggaggggattggctacaacatcatccgggttcccatggctagctgtgacttctccattaggacctatacatacgctgacacccccgatgattttcagctccataatttcagtctccctgaagaagacaccaaactgaagatacctctgattcacagagccttgcaactggcacaaaggccagtgagcctcttggcttctccctggactagtcctacatggctgaagactaatggtgctgttaatgggaaaggctccctgaaaggacagccaggtgacatatatcatcagacatgggcccgctactttgtgaaattccttgatgcctatgcagagcacaagctccagttctgggcagtcaccgcagaaaacgagccctcagctgggctgctgtctggctacccctttcagtgcttgggctttactcctgagcatcaacgggacttcattgcccgggatttggggccaacactggccaacagcacccaccacaatgtaagactcctcatactggatgaccagaggctgctgctccctcattgggccaaggtggtgttgacagacccagaagctgccaaatatgttcatggcatcgctgtccactggtacctggattttttggcccctgcaaaggctactctgggagagacccacagactcttccccaataccatgctgtttgcatcagaagcctgcgtggggagcaaattctgggagcagtctgttaggctgggttcctgggatcggggcatgcaatattcccatagtataataactaacctcctctaccacgtggtaggatggacagactggaatctggctttgaacccagaaggaggccccaattgggtgcgcaactttgttgacagccccatcattgtggatatcacaaaggacaccttctacaaacagcctatgttctatcatctggggcactttagcaagttcattccagagggttcccagagagtaggcttggttgcctcacagaagactgatctggatgctgtggcactcatgcatcctgacgggagtgcagtggtggtagtactgaacaggtctagcaaagatgttcccttgactatcaaagacccagctgtgggctttctggaaaccatttcccctggatactctatccacacctatctctggagaagacagtaatga

SEQ ID NO: 26 - protein, 536 aa, synthetic construct
  REGION 1..536: note = Variant of B-Glucocerebrosidase
MEFSSPSREECPKPLSRVSIMAASLTGLLLLQAVSWASGARPCIPKSFGYSSVVCVCNATYCDSLDPPTLPALGTFSRYESTRSGRRMELSMGPIQANHTGTGLLLTLQPEQKFQKVKGFGGAMTDAAALNILALSPPAQDLLLKSYFSEEGIGYNIIRVPMASCDFSIRTYTYADTPDDFQLHNFSLPEEDTKLKIPLIHRALQLAQRPVSLLASPWTSPTWLKTNGAVNGKGSLKGQPGDIYHQTWARYFVKFLDAYAEHKLQFWAVTAENEPSAGLLSGYPFQCLGFTPEHQRDFIARDLGPTLANSTHHNVRLLILDDQRLLLPHWAKVVLTDPEAAKYVHGIAVHWYLDFLAPAKATLGETHRLFPNTMLFASEACVGSKFWEQSVRLGSWDRGMQYSHSIITNLLYHVVGWTDWNLALNPEGGPNWVRNFVDSPIIVDITKDTFYKQPMFYHLGHFSKFIPEGSQRVGLVASQKTDLDAVALMHPDGSAVVVVLNRSSKDVPLTIKDPAVGFLETISPGYSIHTYLWRRQ

SEQ ID NO: 27 - DNA, 1614 bp, synthetic construct
  misc_feature 1..1614: note = Variant of B-Glucocerebrosidase
  source 1..1614: mol_type = other DNA
atggagttttcttctcctagtagagaagaatgccccaagccactgagcagggtgagcatcatggctgcatccctcacagggctgcttcttttgcaggcagtctcatgggcctctggagccaggccctgtattcccaagtcattcggctactcctcagtggtgtgtgtatgcaatgccacctattgtgacagttttgatcctccaactttccctgctctgggtaccttctcccggtatgagagcacaagaagtggaagacgcatggagctctcaatgggcccaatacaggctaaccacactgggacaggtctgctgctgaccctccagcctgaacagaagtttcagaaagtcaagggatttggaggagccatgactgatgcagcagcactcaacatcttggccctgtctccaccagcccagaatctgctgttgaagtcctacttctcagaggaggggattggctacaacatcatccgggttcccatggctagctgtgacttctccattaggacctatacatacgctgacacccccgatgattttcagctccataatttcagtctccctgaagaagacaccaaactgaagatacctctgattcacagagccttgcaactggcacaaaggccagtgagcctcttggcttctccctggactagtcctacatggctgaagactaatggtgctgttaatgggaaaggctccctgaaaggacagccaggtgacatatatcatcagacatgggcccgctactttgtgaaattccttgatgcctatgcagagcacaagctcacattctgggcagtcaccgcagaaaacgagccctcagctgggctgctgtctggctacccctttcagtgcttgggctttactcctgagcatcaacgggacttcattgcccgggatttggggccaacactggccaacagcacccaccacaatgtaagactcctcatgctggatgaccagaggctgctgctccctcattgggccaaggtggtgttgacagacccagaagctgccaaatatgttcatggcatcgctgtccactggtacctggattttttggcccctgcaaaggctactctgggagagacccacagactcttccccaacaccatgctgtttgcatcagaagcctgcgtggggagcaaattctgggagcagtctgttaggctgggttcctgggatcggggcatgcaatattcccatagtataataactaacctcctctaccacgtggtaggatggacagactggaatctggctttgaacccagaaggaggccccaattgggtgcgcaactttgttgacagccccatcattgtggatatcacaaaggacaccttctacaaacagcctatgttctatcatctggggcactttagcaagttcattccagagggttcccagagagtaggcttggttgcctcacagaagaatgatctggatgctgtggcactcatgcatcctgacgggagtgcagtggtggtagtactgaacaggtctagcaaagatgttcccttgactatcaaagacccagctgtgggctttctggaaaccatttcccctggatactctatccacacctatctctggagaagacagtaatga

SEQ ID NO: 28 - protein, 536 aa, synthetic construct
  REGION 1..536: note = Variant of B-Glucocerebrosidase
MEFSSPSREECPKPLSRVSIMAASLTGLLLLQAVSWASGARPCIPKSFGYSSVVCVCNATYCDSFDPPTFPALGTFSRYESTRSGRRMELSMGPIQANHTGTGLLLTLQPEQKFQKVKGFGGAMTDAAALNILALSPPAQNLLLKSYFSEEGIGYNIIRVPMASCDFSIRTYTYADTPDDFQLHNFSLPEEDTKLKIPLIHRALQLAQRPVSLLASPWTSPTWLKTNGAVNGKGSLKGQPGDIYHQTWARYFVKFLDAYAEHKLTFWAVTAENEPSAGLLSGYPFQCLGFTPEHQRDFIARDLGPTLANSTHHNVRLLMLDDQRLLLPHWAKVVLTDPEAAKYVHGIAVHWYLDFLAPAKATLGETHRLFPNTMLFASEACVGSKFWEQSVRLGSWDRGMQYSHSIITNLLYHVVGWTDWNLALNPEGGPNWVRNFVDSPIIVDITKDTFYKQPMFYHLGHFSKFIPEGSQRVGLVASQKNDLDAVALMHPDGSAVVVVLNRSSKDVPLTIKDPAVGFLETISPGYSIHTYLWRRQ

SEQ ID NO: 29 - DNA, 1614 bp, synthetic construct
  misc_feature 1..1614: note = Variant of B-Glucocerebrosidase
  source 1..1614: mol_type = other DNA
atggagttttcttctcctagtagagaagaatgccccaagccactgagcagggtgagcatcatggctggatccctcacagggctgcttcttttgcaggcagtctcatgggcctctggagccaggccctgtattcccaagtcattcggctactcctcagtggtgtgtgtatgcaatgccacctattgtgacagtttcgatcctccaactttccctgctctgggtaccttctcccggtatgagagcacaagaagtggaagacgcatggagctctcaatgggcccaatacaggctaaccacactgggacaggtctgctgctgaccctccagcctgaacagaagtttcagaaagtcaagggatttggaggagccatgactgatgcagcagcactcaacatcttggccctgtctccaccagcccagaatctgctgttgaagtcctacttctcagaggaggggattggctacaacatcatccgggttcccatggctagctgtgacttctccattaggacctatacatacgctgacacccccgatgattttcagctccataatttcagtctccctgaagaagacaccaaactgaagatacctctgattcacagagccttgcaactggcacaaaggccagtgagcctcttggcttctccctggactagtcctacatggctgaagactaatggtgctgttaatgggaaaggctccctgaaaggacagccaggtgacatatatcatcagacatgggcccgctactttgtgaaattccttgatgcctatgcagagcacaagctccaattctgggcagtcaccgcagaaaacgagccctcagctgggctgctgtctggctacccctttcagtgcttgggctttactcctgagcatcaacgggacttcattgcccgggatttggggccaacactggccaacagcacccaccacaatgtaagactcctcatgctggatgaccagaggctgctgctccctcattgggccaaggtggtgttgacagacccagaagctgccaaatatgttcatggcatcgctgtccactggtacctggattttttggcccctgcaaaggctactctgggagagacccacagactcttccccgataccatgctgtttgcatcagaagcctgcgtggggagcaaattctgggagcagtctgttaggctgggttcctgggatcggggcatgcaatattcccatagtataataactaacctcctctaccacgtggtaggatggacagactggaatctggctttgaacccagaaggaggccccaattgggtgcgcaactttgttgacagccccatcattgtggatatcacaaaggacaccttctacaaacagcctatgttctatcatctggggcactttagcaagttcattccagagggttcccagagagtaggcttggttgcctcacagaagaatgatctggatgctgtggcactcatgcatcctgacgggagtgcagtggtggtagtactgaacaggtctagcaaagatgttcccttgactatcaaagacccagctgtgggctttctggaaaccatttcccctggatactctatccacacctatctctggagaagacagtaatga

SEQ ID NO: 30 - protein, 536 aa, synthetic construct
  REGION 1..536: note = Variant of B-Glucocerebrosidase
MEFSSPSREECPKPLSRVSIMAGSLTGLLLLQAVSWASGARPCIPKSFGYSSVVCVCNATYCDSFDPPTFPALGTFSRYESTRSGRRMELSMGPIQANHTGTGLLLTLQPEQKFQKVKGFGGAMTDAAALNILALSPPAQNLLLKSYFSEEGIGYNIIRVPMASCDFSIRTYTYADTPDDFQLHNFSLPEEDTKLKIPLIHRALQLAQRPVSLLASPWTSPTWLKTNGAVNGKGSLKGQPGDIYHQTWARYFVKFLDAYAEHKLQFWAVTAENEPSAGLLSGYPFQCLGFTPEHQRDFIARDLGPTLANSTHHNVRLLMLDDQRLLLPHWAKVVLTDPEAAKYVHGIAVHWYLDFLAPAKATLGETHRLFPDTMLFASEACVGSKFWEQSVRLGSWDRGMQYSHSIITNLLYHVVGWTDWNLALNPEGGPNWVRNFVDSPIIVDITKDTFYKQPMFYHLGHFSKFIPEGSQRVGLVASQKNDLDAVALMHPDGSAVVVVLNRSSKDVPLTIKDPAVGFLETISPGYSIHTYLWRRQ

SEQ ID NO: 31 - DNA, 1614 bp, synthetic construct
  misc_feature 1..1614: note = Variant of B-Glucocerebrosidase
  source 1..1614: mol_type = other DNA
atggagttttcttctcctagtagagaagaatgccccaagccactgagcagggtgagcatcatggctggctccctcacagggctgcttcttttgcaggcagtctcatgggcctctggagccaggccctgtattcccaagtcattcggctactcctcagtggtgtgtgtatgcaatgccacctattgtgacagttttgatcctccaactttccctgctctgggtaccttctcccggtatgagagcacaagaagtggaagacgcatggagctctcaatgggcccaatacaggctaaccacactgggacaggtctgctgctgaccctccagcctgaacagaagtttcagaaagtcaagggatttggaggagccatgactgatgcagcagcactcaacatcttggccctgtctccaccagcccagaatctgctgttgaagtcctacttctcagaggaggggattggctacaacatcatccgggttcccatggctagctgtgacttctccattaggacctatacatacgctgacacccccgatgattttcagctccataatttcagtctccctgaagaagacaccaaactgaagatacctctgattcacagagccttgcaactggcccaaaggccagtgagcctcttcgcttctccctggactagtcctacatggctgaagactaatggtgctgttaatgggaaaggctccctgaaaggacagccaggtgacatctatcatcagacatgggcccgctactttgtgaaattccttgatgcctatgcagagcacaagctccagttctgggcagtcaccgcagaaaacgagccctcagctgggctgctgtctggctacccctttcagtgcttgggctttactcctgagcatcaacgggacttcattgcccgggatttggggccaacactggccaacagcacccaccacaatgtaagactcctcatgctggatgaccagaggctgctgctccctcattgggccaaggtggtgttgacagacccagaagctgccaaatatgttcatggcatcgctgtccactggtacctggattttttggcccctgcaaaggctactctgggagagacccacagactcttccccaacaccatgctgtttgcatcagaagcctgcgtggggagcaaattctgggagcagtctgttaggctgggttcctgggatcggggcatgcaatattcccatagtataataactaacctcctctaccacgtggtaggatggacagactggaatctggctttgaacccagaaggaggccccaattgggtgcgcaactttgttgacagccccatcattgtggatatcacaaaggacaccttctacaaacagcctatgttctatcatctggggcactttagcaagttcattccagagggttcccagagagtaggcttggttgcctcacagaagaatgatctggatgctgtggcactcatgcatcctgacgggagtgcagtggtggtagtactgaacaggtctagcaaagatgttcccttgactatcaaagacccagctgtgggctttctggaaaccatttcccctggatactctatccacacctatctctggagaagacagtaatga

SEQ ID NO: 32 - protein, 536 aa, synthetic construct
  REGION 1..536: note = Variant of B-Glucocerebrosidase
MEFSSPSREECPKPLSRVSIMAGSLTGLLLLQAVSWASGARPCIPKSFGYSSVVCVCNATYCDSFDPPTFPALGTFSRYESTRSGRRMELSMGPIQANHTGTGLLLTLQPEQKFQKVKGFGGAMTDAAALNILALSPPAQNLLLKSYFSEEGIGYNIIRVPMASCDFSIRTYTYADTPDDFQLHNFSLPEEDTKLKIPLIHRALQLAQRPVSLFASPWTSPTWLKTNGAVNGKGSLKGQPGDIYHQTWARYFVKFLDAYAEHKLQFWAVTAENEPSAGLLSGYPFQCLGFTPEHQRDFIARDLGPTLANSTHHNVRLLMLDDQRLLLPHWAKVVLTDPEAAKYVHGIAVHWYLDFLAPAKATLGETHRLFPNTMLFASEACVGSKFWEQSVRLGSWDRGMQYSHSIITNLLYHVVGWTDWNLALNPEGGPNWVRNFVDSPIIVDITKDTFYKQPMFYHLGHFSKFIPEGSQRVGLVASQKNDLDAVALMHPDGSAVVVVLNRSSKDVPLTIKDPAVGFLETISPGYSIHTYLWRRQ

SEQ ID NO: 33 - DNA, 1614 bp, synthetic construct
  misc_feature 1..1614: note = Variant of B-Glucocerebrosidase
  source 1..1614: mol_type = other DNA
atggagttttcttctcctagtagagaagaatgccccaagccactgagcagggtgagcatcatggctgcatccctcacagggctgcttcttttgcaggcagtctcatgggcctctggagccaggccctgtattcccaagtcattcggctactcctcagtggtgtgtgtatgcaatgccacctattgtgacagtctcgatcctccaactctccctgctctgggtaccttctcccggtatgagagcacaagaagtggaagacgcatggagctctcaatgggccctatacaggctaaccacactgggacaggtctgctgctgaccctcgaccctgaacagaagtttcagaaagtcaagggatttggaggagccatgactgatgcagcagcactcaacatcttggccctgtctccaccagcccaggatctgctgttgaagtcctacttctcagaggaggggattggctacaacatcatccgggttcccatggctagctgtgacttctccattaggacctatacatacgctgacacccccgatgattttcagctccataatttcagtctccctgaagaagacaccaaactgaagatacctctgattcacagagccttgcaactggcacaaaggccagtgagcctcttcgcttctccctggactagtcctacatggctgaagactaatggtgctgttaatgggaaaggctccctgaaaggacagccaggtgacatatatcatcagacatgggcccgctactttgtgaaattccttgatgcctatgcagagcacaagctccaattctgggcagtcaccgcagaaaacgagccctcagctgggctgctgtctggctacccctttcagtgcttgggctttactcctgagcatcaacgggacttcattgcccgggatttggggccaacactggccaacagcacccaccacaatgtaagactcctcatgctggatgaccagaggctgctgctccctcattgggccaaggtggtgttgacagacccagaagctgccaaatatgttcatggcatcgctgtccactggtacctggattttttggcccctgcaaaggctactctgggagagacccacagactcttccccaacaccatgctgtttgcatcagaagcctgcgtggggagcaaattctgggagcagtctgttaggctgggttcctgggatcggggcatgcaatattcccatagtataataactaacctcctctaccacgtggtaggatggacagactggaatctggctttgaacccagaaggaggccccaattgggtgcgcaactttgttgacagccccatcattgtggatatcacaaaggacaccttctacaaacagcctatgttctatcatctggggcactttagcaagttcattccagagggttcccagagagtaggcttggttgcctcacagaagaatgatctggatgctgtggcactcatgcatcctgacgggagtgcagtggtggtagtactgaacaggtctagcaaagatgttcccttgactatcaaagacccagctgtgggctttctggaaaccatttcccctggatactctatccacacctatctctggagaagacagtaatga

SEQ ID NO: 34 - protein, 536 aa, synthetic construct
  REGION 1..536: note = Variant of B-Glucocerebrosidase from Homo Sapiens
MEFSSPSREECPKPLSRVSIMAASLTGLLLLQAVSWASGARPCIPKSFGYSSVVCVCNATYCDSLDPPTLPALGTFSRYESTRSGRRMELSMGPIQANHTGTGLLLTLDPEQKFQKVKGFGGAMTDAAALNILALSPPAQDLLLKSYFSEEGIGYNIIRVPMASCDFSIRTYTYADTPDDFQLHNFSLPEEDTKLKIPLIHRALQLAQRPVSLFASPWTSPTWLKTNGAVNGKGSLKGQPGDIYHQTWARYFVKFLDAYAEHKLQFWAVTAENEPSAGLLSGYPFQCLGFTPEHQRDFIARDLGPTLANSTHHNVRLLMLDDQRLLLPHWAKVVLTDPEAAKYVHGIAVHWYLDFLAPAKATLGETHRLFPNTMLFASEACVGSKFWEQSVRLGSWDRGMQYSHSIITNLLYHVVGWTDWNLALNPEGGPNWVRNFVDSPIIVDITKDTFYKQPMFYHLGHFSKFIPEGSQRVGLVASQKNDLDAVALMHPDGSAVVVVLNRSSKDVPLTIKDPAVGFLETISPGYSIHTYLWRRQ

SEQ ID NO: 35 - DNA, 1614 bp, synthetic construct
  misc_feature 1..1614: note = Variant of B-Glucocerebrosidase
  source 1..1614: mol_type = other DNA
atggagttttcttctcctagtagagaagaatgccccaagccactgagcagggtgagcatcatggctggctccctcacagggctgcttcttttgcaggcagtctcatgggcctctggagccaggccctgtattcccaagtcattcggctactcctcagtggtgtgtgtatgcaatgccacctattgtgacagttttgatcctccaactttccctgctctgggtaccttctcccggtatgagagcacaagaagtggaagacgcatggagctctcaatgggcccaatacaggctaaccacactgggacaggtctgctgctgaccctccaacctgaacagaagtttcagaaagtcaagggatttggaggagccatgactgatgcagcagcactcaacatcttggccctgtctccaccagcccagaatctgctgttgaagtcctacttctcagaggaggggattggctacaacatcatccgggttcccatggctagctgtgacttctccattaggacctatacatacgctgacacccccgatgattttcagctccataatttcagtctccctgaagaagacaccaaactgaagatacctctgattcacagagccttgcaactggcacaaaggccagtgagcctcttggcttctccctggactagtcctacatggctgaagactaatggtgctgttaatgggaaaggctccctgaaaggacagccaggtgacatctatcatcagacatgggcccgctactttgtgaaattccttgatgcctatgcagagcacaagctccagttctgggcagtcaccgcagaaaacgagccctcagctgggctgctgtctggctacccctttcagtgcttgggctttactcctgagcatcaacgggacttcattgcccgggatttggggccaacactggccaacagcacccaccacaatgtaagactcctcatactggatgaccagaggctgctgctccctcattgggccaaggtggtgttgacagacccagaagctgccaaatatgttcatggcatcgctgtccactggtacctggattttttggcccctgcaaaggctactctgggagagacccacagactcttccccaacaccatgctgtttgcatcagaagcctgcgtggggagcaaattctgggagcagtctgttaggctgggttcctgggatcggggcatgcaatattcccatagtataataactaacctcctctaccacgtggtaggatggacagactggaatctggctttgaacccagaaggaggccccaattgggtgcgcaactttgttgacagccccatcattgtggatatcacaaaggacaccttctacaaacagcctatgttctatcatctggggcactttagcaagttcattccagagggttcccagagagtaggcttggttgcctcacagaagaatgatctggatgctgtggcactcatgcatcctgacgggagtgcagtggtggtagtactgaacaggtctagcaaagatgttcccttgactatcaaagacccagctgtgggctttctggaaaccatttcccctggatactctatccacacctatctctggagaagacagtaatga

SEQ ID NO: 36 - protein, 536 aa, synthetic construct
  REGION 1..536: note = Variant of B-Glucocerebrosidase
MEFSSPSREECPKPLSRVSIMAGSLTGLLLLQAVSWASGARPCIPKSFGYSSVVCVCNATYCDSFDPPTFPALGTFSRYESTRSGRRMELSMGPIQANHTGTGLLLTLQPEQKFQKVKGFGGAMTDAAALNILALSPPAQNLLLKSYFSEEGIGYNIIRVPMASCDFSIRTYTYADTPDDFQLHNFSLPEEDTKLKIPLIHRALQLAQRPVSLLASPWTSPTWLKTNGAVNGKGSLKGQPGDIYHQTWARYFVKFLDAYAEHKLQFWAVTAENEPSAGLLSGYPFQCLGFTPEHQRDFIARDLGPTLANSTHHNVRLLILDDQRLLLPHWAKVVLTDPEAAKYVHGIAVHWYLDFLAPAKATLGETHRLFPNTMLFASEACVGSKFWEQSVRLGSWDRGMQYSHSIITNLLYHVVGWTDWNLALNPEGGPNWVRNFVDSPIIVDITKDTFYKQPMFYHLGHFSKFIPEGSQRVGLVASQKNDLDAVALMHPDGSAVVVVLNRSSKDVPLTIKDPAVGFLETISPGYSIHTYLWRRQ

SEQ ID NO: 37 - DNA, 1614 bp, synthetic construct
  misc_feature 1..1614: note = Variant of B-Glucocerebrosidase
  source 1..1614: mol_type = other DNA
atggagttttcttctcctagtagagaagaatgccccaagccactgagcagggtgagcatcatggctggatccctcacagggctgcttcttttgcaggcagtctcatgggcctctggagccaggccctgtattcccaagtcattcggctactcctcagtggtgtgtgtatgcaatgccacctattgtgacagtctcgatcctccaactttccctgctctgggtaccttctcccggtatgagagcacaagaagtggaagacgcatggagctctcaatgggcccaatacaggctaaccacactgggacaggtctgctgctgaccctccagcctgaacagaagtttcagaaagtcaagggatttggaggagccatgactgatgcagcagcactcaacatcttggccctgtctccaccagcccagaatctgctgttgaagtcctacttctcagaggaggggattggctacaacatcatccgggttcccatggctagctgtgacttctccattaggacctatacatacgctgacacccccgatgattttcagctccataatttcagtctccctgaagaagacaccaaactgaagatacctctgattcacagagccttgcaactggcacaaaggccagtgagcctcttggcttctccctggactagtcctacatggctgaagactaatggtgctgttaatgggaaaggctccctgaaaggacagccaggtgacatatatcatcagacatgggcccgctactttgtgaaattccttgatgcctatgcagagcacaagctccaattctgggcagtcaccgcagaaaacgagccctcagctgggctgctgtctggctacccctttcagtgcttgggctttactcctgagcatcaacgggacttcattgcccgggatttggggccaacactggccaacagcacccaccacaatgtaagactcctcatgctggatgaccagaggctgctgctccctcattgggccaaggtggtgttgacagacccagaagctgccaaatatgttcatggcatcgctgtccactggtacctggattttttggcccctgcaaaggctactctgggagagacccacagactcttccccgataccatgctgtttgcatcagaagcctgcgtggggagcaaattctgggagcagtctgttaggctgggttcctgggatcggggcatgcaatattcccatagtataataactaacctcctctaccacgtggtaggatggacagactggaatctggctttgaacccagaaggaggccccaattgggtgcgcaactttgttgacagccccatcattgtggatatcacaaaggacaccttctacaaacagcctatgttctatcatctggggcactttagcaagttcattccagagggttcccagagagtaggcttggttgcctcacagaagaatgatctggatgctgtggcactcatgcatcctgacgggagtgcagtggtggtagtactgaacaggtctagcaaagatgttcccttgactatcaaagacccagctgtgggctttctggaaaccatttcccctggatactctatccacacctatctctggagaagacagtaatga

SEQ ID NO: 38 - protein, 536 aa, synthetic construct
  REGION 1..536: note = Variant of B-Glucocerebrosidase
MEFSSPSREECPKPLSRVSIMAGSLTGLLLLQAVSWASGARPCIPKSFGYSSVVCVCNATYCDSLDPPTFPALGTFSRYESTRSGRRMELSMGPIQANHTGTGLLLTLQPEQKFQKVKGFGGAMTDAAALNILALSPPAQNLLLKSYFSEEGIGYNIIRVPMASCDFSIRTYTYADTPDDFQLHNFSLPEEDTKLKIPLIHRALQLAQRPVSLLASPWTSPTWLKTNGAVNGKGSLKGQPGDIYHQTWARYFVKFLDAYAEHKLQFWAVTAENEPSAGLLSGYPFQCLGFTPEHQRDFIARDLGPTLANSTHHNVRLLMLDDQRLLLPHWAKVVLTDPEAAKYVHGIAVHWYLDFLAPAKATLGETHRLFPDTMLFASEACVGSKFWEQSVRLGSWDRGMQYSHSIITNLLYHVVGWTDWNLALNPEGGPNWVRNFVDSPIIVDITKDTFYKQPMFYHLGHFSKFIPEGSQRVGLVASQKNDLDAVALMHPDGSAVVVVLNRSSKDVPLTIKDPAVGFLETISPGYSIHTYLWRRQ

SEQ ID NO: 39 - DNA, 1614 bp, synthetic construct
  misc_feature 1..1614: note = Variant of B-Glucocerebrosidase
  source 1..1614: mol_type = other DNA
atggagttttcttctcctagtagagaagaatgccccaagccactgagcagggtgagcatcatggctggatccctcacagggctgcttcttttgcaggcagtctcatgggcctctggagccaggccctgtattcccaagtcattcggctactcctcagtggtgtgtgtatgcaatgccacctattgtgacagttttgatcctccaactttccctgctctgggtaccttctcccggtatgagagcacaagaagtggaagacgcatggagctctcaatgggccctatacaggctaaccacactgggacaggtctgctgctgaccctcgaccctgaacagaagtttcagaaagtcaagggatttggaggagccatgactgatgcagcagcactcaacatcttggccctgtctccaccagcccagaatctgctgttgaagtcctacttctcagaggaggggattggctacaacatcatccgggttcccatggctagctgtgacttctccattaggacctatacatacgctgacacccccgatgattttcagctccataatttcagtctccctgaagaagacaccaaaatgaagatacctctgattcacagagccttgcaactggcccaaaggccagtgagcctcctcgcttctccctggactagtcctacatggctgaagactaatggtgctgttaatgggaaaggctccctgaaaggacagccaggtgacatctatcatcagacatgggcccgctactttgtgaaattccttgatgcctatgcagagcacaagctccaattctgggcagtcaccgcagaaaacgagccctcagctgggctgctgtctggctacccctttcagtgcttgggctttactcctgagcatcaacgggacttcattgcccgggatttggggccaacactggccaacagcacccaccacaatgtaagactcctcatgctggatgaccagaggctgctgctccctcattgggccaaggtggtgttgacagacccagaagctgccaaatatgttcatggcatcgctgtccactggtacctggattttttggcccctgcaaaggctactctgggagagacccacagactcttccccaataccatgctgtttgcatcagaagcctgcgtggggagcaaattctgggagcagtctgttaggctgggttcctgggatcggggcatgcaatattcccatagtataataactaacctcctctaccacgtggtaggatggacagactggaatctggctttgaacccagaaggaggccccaattgggtgcgcaactttgttgacagccccatcattgtggatatcacaaaggacaccttctacaaacagcctatgttctatcatctggggcactttagcaagttcattccagagggttcccagagagtaggcttggttgcctcacagaagaatgatctggatgctgtggcactcatgcatcctgacgggagtgcagtggtggtagtactgaacaggtctagcaaagatgttcccttgactatcaaagacccagctgtgggctttctggaaaccatttcccctggatactctatccacacctatctctggagaagacagtaatga

SEQ ID NO: 40 - protein, 536 aa, synthetic construct
  REGION 1..536: note = Variant of B-Glucocerebrosidase
MEFSSPSREECPKPLSRVSIMAGSLTGLLLLQAVSWASGARPCIPKSFGYSSVVCVCNATYCDSFDPPTFPALGTFSRYESTRSGRRMELSMGPIQANHTGTGLLLTLDPEQKFQKVKGFGGAMTDAAALNILALSPPAQNLLLKSYFSEEGIGYNIIRVPMASCDFSIRTYTYADTPDDFQLHNFSLPEEDTKMKIPLIHRALQLAQRPVSLLASPWTSPTWLKTNGAVNGKGSLKGQPGDIYHQTWARYFVKFLDAYAEHKLQFWAVTAENEPSAGLLSGYPFQCLGFTPEHQRDFIARDLGPTLANSTHHNVRLLMLDDQRLLLPHWAKVVLTDPEAAKYVHGIAVHWYLDFLAPAKATLGETHRLFPNTMLFASEACVGSKFWEQSVRLGSWDRGMQYSHSIITNLLYHVVGWTDWNLALNPEGGPNWVRNFVDSPIIVDITKDTFYKQPMFYHLGHFSKFIPEGSQRVGLVASQKNDLDAVALMHPDGSAVVVVLNRSSKDVPLTIKDPAVGFLETISPGYSIHTYLWRRQ

SEQ ID NO: 41 - DNA, 1614 bp, synthetic construct
  misc_feature 1..1614: note = Variant of B-Glucocerebrosidase
  source 1..1614: mol_type = other DNA
atggagttttcttctcctagtagagaagaatgccccaagccactgagcagggtgagcatcatggctgcatccctcacagggctgcttcttttgcaggcagtctcatgggcctctggagccaggccctgtattcccaagtcattcggctactcctcagtggtgtgtgtatgcaatgccacctattgtgacagtctcgatcctccaactttccctgctctgggtaccttctcccggtatgagagcacaagaagtggaagacgcatggagctctcaatgggcccaatacaggctaaccacactgggacaggtctgctgctgaccctccaacctgaacagaagtttcagaaagtcaagggatttggaggagccatgactgatgcagcagcactcaacatcttggccctgtctccaccagcccagaatctgctgttgaagtcctacttctcagaggaggggattggctacaacatcatccgggttcccatggctagctgtgacttctccattaggacctatacatacgctgacacccccgatgattttcagctccataatttcagtctccctgaagaagacaccaaactgaagatacctctgattcacagagccttgcaactggcacaaaggccagtgagcctcttggcttctccctggactagtcctacatggctgaagactaatggtgctgttaatgggaaaggctccctgaaaggacagccaggtgacatatatcatcagacatgggcccgctactttgtgaaattccttgatgcctatgcagagcacaagctccaattctgggcagtcaccgcagaaaacgagccctcagctgggctgctgtctggctacccctttcagtgcttgggctttactcctgagcatcaacgggacttcattgcccgggatttggggccaacactggccaacagcacccaccacaatgtaagactcctcatgctggatgaccagaggctgctgctccctcattgggccaaggtggtgttgacagacccagaagctgccaaatatgttcatggcatcgctgtccactggtacctggattttttggcccctgcaaaggctactctgggagagacccacagactcttccccaacaccatgctgtttgcatcagaagcctgcgtggggagcaaattctgggagcagtctgttaggctgggttcctgggatcggggcatgcaatattcccatagtataataactaacctcctctaccacgtggtaggatggacagactggaatctggctttgaacccagaaggaggccccaattgggtgcgcaactttgttgacagccccatcattgtggatatcacaaaggacaccttctacaaacagcctatgttctatcatctggggcactttagcaagttcattccagagggttcccagagagtaggcttggttgcctcacagaagaatgatctggatgctgtggcactcatgcatcctgacgggagtgcagtggtggtagtactgaacaggtctagcaaagatgttcccttgactatcaaagacccagctgtgggctttctggaaaccatttcccctggatactctatccacacctatctctggagaagacagtaatga

SEQ ID NO: 42 - protein, 536 aa, synthetic construct
  REGION 1..536: note = Variant of B-Glucocerebrosidase
MEFSSPSREECPKPLSRVSIMAASLTGLLLLQAVSWASGARPCIPKSFGYSSVVCVCNATYCDSLDPPTFPALGTFSRYESTRSGRRMELSMGPIQANHTGTGLLLTLQPEQKFQKVKGFGGAMTDAAALNILALSPPAQNLLLKSYFSEEGIGYNIIRVPMASCDFSIRTYTYADTPDDFQLHNFSLPEEDTKLKIPLIHRALQLAQRPVSLLASPWTSPTWLKTNGAVNGKGSLKGQPGDIYHQTWARYFVKFLDAYAEHKLQFWAVTAENEPSAGLLSGYPFQCLGFTPEHQRDFIARDLGPTLANSTHHNVRLLMLDDQRLLLPHWAKVVLTDPEAAKYVHGIAVHWYLDFLAPAKATLGETHRLFPNTMLFASEACVGSKFWEQSVRLGSWDRGMQYSHSIITNLLYHVVGWTDWNLALNPEGGPNWVRNFVDSPIIVDITKDTFYKQPMFYHLGHFSKFIPEGSQRVGLVASQKNDLDAVALMHPDGSAVVVVLNRSSKDVPLTIKDPAVGFLETISPGYSIHTYLWRRQ

SEQ ID NO: 43 - DNA, 1614 bp, synthetic construct
  misc_feature 1..1614: note = Variant of B-Glucocerebrosidase
  source 1..1614: mol_type = other DNA
atggagttttcttctcctagtagagaagaatgccccaagccactgagcagggtgagcatcatggctggatccctcacagggctgcttcttttgcaggcagtctcatgggcctctggagccaggccctgtattcccaagtcattcggctactcctcagtggtgtgtgtatgcaatgccacctattgtgacagtttcgatcctccaactttccctgctctgggtaccttctcccggtatgagagcacaagaagtggaagacgcatggagctctcaatgggccctatacaggctaaccacactgggacaggtctgctgctgaccctccagcctgaacagaagtttcagaaagtcaagggatttggaggagccatgactgatgcagcagcactcaacatcttggccctgtctccaccagcccagaatctgctgttgaagtcctacttctcagaggaggggattggctacaacatcatccgggttcccatggctagctgtgacttctccattaggacctatacatacgctgacacccccgatgattttcagctccataatttcagtctccctgaagaagacaccaaactgaagatacctctgattcacagagccttgcaactgtcccaaaggccagtgagcctcctcgcttctccctggactagtcctacatggctgaagactaatggtgctgttaatgggaaaggctccctgaaaggacagccaggtgacatatatcatcagacatgggcccgctactttgtgaaattccttgatgcctatgcagagcacaagctcacattctgggcagtcaccgcagaaaacgagccctcagctgggctgctgtctggctacccctttcagtgcttgggctttactcctgagcatcaacgggacttcattgcccgggatttggggccaacactggccaacagcacccaccacaatgtaagactcctcatactggatgaccagaggctgctgctccctcattgggccaaggtggtgttgacagacccagaagctgccaaatatgttcatggcatcgctgtccactggtacctggattttttggcccctgcaaaggctactctgggagagacccacagactcttccccaataccatgctgtttgcatcagaagcctgcgtggggagcaaattctgggagcagtctgttaggctgggttcctgggatcggggcatgcaatattcccatagtataataactaacctcctctaccacgtggtaggatggacagactggaatctggctttgaacccagaaggaggccccaattgggtgcgcaactttgttgacagccccatcattgtggatatcacaaaggacaccttctacaaacagcctatgttctatcatctggggcactttagcaagttcattccagagggttcccagagagtaggcttggttgcctcacagaagaatgatctggatgctgtggcactcatgcatcctgacgggagtgcagtggtggtagtactgaacaggtctagcaaagatgttcccttgactatcaaagacccagctgtgggctttctggaaaccatttcccctggatactctatccacacctatctctggagaagacagtaatga

SEQ ID NO: 44 - protein, 536 aa, synthetic construct
  REGION 1..536: note = Variant of B-Glucocerebrosidase
MEFSSPSREECPKPLSRVSIMAGSLTGLLLLQAVSWASGARPCIPKSFGYSSVVCVCNATYCDSFDPPTFPALGTFSRYESTRSGRRMELSMGPIQANHTGTGLLLTLQPEQKFQKVKGFGGAMTDAAALNILALSPPAQNLLLKSYFSEEGIGYNIIRVPMASCDFSIRTYTYADTPDDFQLHNFSLPEEDTKLKIPLIHRALQLSQRPVSLLASPWTSPTWLKTNGAVNGKGSLKGQPGDIYHQTWARYFVKFLDAYAEHKLTFWAVTAENEPSAGLLSGYPFQCLGFTPEHQRDFIARDLGPTLANSTHHNVRLLILDDQRLLLPHWAKVVLTDPEAAKYVHGIAVHWYLDFLAPAKATLGETHRLFPNTMLFASEACVGSKFWEQSVRLGSWDRGMQYSHSIITNLLYHVVGWTDWNLALNPEGGPNWVRNFVDSPIIVDITKDTFYKQPMFYHLGHFSKFIPEGSQRVGLVASQKNDLDAVALMHPDGSAVVVVLNRSSKDVPLTIKDPAVGFLETISPGYSIHTYLWRRQ

SEQ ID NO: 45 - DNA, 1614 bp, synthetic construct
  misc_feature 1..1614: note = Variant of B-Glucocerebrosidase
  source 1..1614: mol_type = other DNA
atggagttttcttctcctagtagagaagaatgccccaagccactgagcagggtgagcatcatggctggatccctcacagggctgcttcttttgcaggcagtctcatgggcctctggagccaggccctgtattcccaagtcattcggctactcctcagtggtgtgtgtatgcaatgccacctattgtgacagttttgatcctccaactttccctgctctgggtaccttctcccggtatgagagcacaagaagtggaagacgcatggagctctcaatgggcccaatacaggctaaccacactgggacaggtctgctgctgaccctcgaccctgaacagaagtttcagaaagtcaagggatttggaggagccatgactgatgcagcagcactcaacatcttggccctgtctccaccagcccagaatctgctgttgaagtcctacttctcagaggaggggattggctacaacatcatccgggttcccatggctagctgtgacttctccattaggacctatacatacgctgacacccccgatgattttcagctccataatttcagtctccctgaagaagacaccaaactgaagatacctctgattcacagagccttgcaactgtcccaaaggccagtgagcctcttcgcttctccctggactagtcctacatggctgaagactaatggtgctgttaatgggaaaggctccctgaaaggacagccaggtgacatatatcatcagacatgggcccgctactttgtgaaattccttgatgcctatgcagagcacaagctccagttctgggcagtcaccgcagaaaacgagccctcagctgggctgctgtctggctacccctttcagtgcttgggctttactcctgagcatcaacgggacttcattgcccgggatttggggccaacactggccaacagcacccaccacaatgtaagactcctcatgctggatgaccagaggctgctgctccctcattgggccaaggtggtgttgacagacccagaagctgccaaatatgttcatggcatcgctgtccactggtacctggattttttggcccctgcaaaggctactctgggagagacccacagactcttccccgataccatgctgtttgcatcagaagcctgcgtggggagcaaattctgggagcagtctgttaggctgggttcctgggatcggggcatgcaatattcccatagtataataactaacctcctctaccacgtggtaggatggacagactggaatctggctttgaacccagaaggaggccccaattgggtgcgcaactttgttgacagccccatcattgtggatatcacaaaggacaccttctacaaacagcctatgttctatcatctggggcactttagcaagttcattccagagggttcccagagagtaggcttggttgcctcacagaagaatgatctggatgctgtggcactcatgcatcctgacgggagtgcagtggtggtagtactgaacaggtctagcaaagatgttcccttgactatcaaagacccagctgtgggctttctggaaaccatttcccctggatactctatccacacctatctctggagaagacagtaatga

SEQ ID NO: 46 - protein, 536 aa, synthetic construct
  REGION 1..536: note = Variant of B-Glucocerebrosidase
MEFSSPSREECPKPLSRVSIMAGSLTGLLLLQAVSWASGARPCIPKSFGYSSVVCVCNATYCDSFDPPTFPALGTFSRYESTRSGRRMELSMGPIQANHTGTGLLLTLDPEQKFQKVKGFGGAMTDAAALNILALSPPAQNLLLKSYFSEEGIGYNIIRVPMASCDFSIRTYTYADTPDDFQLHNFSLPEEDTKLKIPLIHRALQLSQRPVSLFASPWTSPTWLKTNGAVNGKGSLKGQPGDIYHQTWARYFVKFLDAYAEHKLQFWAVTAENEPSAGLLSGYPFQCLGFTPEHQRDFIARDLGPTLANSTHHNVRLLMLDDQRLLLPHWAKVVLTDPEAAKYVHGIAVHWYLDFLAPAKATLGETHRLFPDTMLFASEACVGSKFWEQSVRLGSWDRGMQYSHSIITNLLYHVVGWTDWNLALNPEGGPNWVRNFVDSPIIVDITKDTFYKQPMFYHLGHFSKFIPEGSQRVGLVASQKNDLDAVALMHPDGSAVVVVLNRSSKDVPLTIKDPAVGFLETISPGYSIHTYLWRRQ

SEQ ID NO: 47 - DNA, 1614 bp, synthetic construct
  misc_feature 1..1614: note = Variant of B-Glucocerebrosidase
  source 1..1614: mol_type = other DNA
atggagttttcttctcctagtagagaagaatgccccaagccactgagcagggtgagcatcatggctgcatccctcacagggctgcttcttttgcaggcagtctcatgggcctctggagccaggccctgtattcccaagtcattcggctactcctcagtggtgtgtgtatgcaatgccacctattgtgacagttttgatcctccaactttccctgctctgggtaccttctcccggtatgagagcacaagaagtggaagacgcatggagctctcaatgggcccaatacaggctaaccacactgggacaggtctgctgctgaccctccaacctgaacagaagtttcagaaagtcaagggatttggaggagccatgactgatgcagcagcactcaacatcttggccctgtctccaccagcccagaatctgctgttgaagtcctacttctcagaggaggggattggctacaacatcatccgggttcccatggctagctgtgacttctccattaggacctatacatacgctgacacccccgatgattttcagctccataatttcagtctccctgaagaagacaccaaactgaagatacctctgattcacagagccttgcaactggcacaaaggccagtgagcctcttggcttctccctggactagtcctacatggctgaagactaatggtgctgttaatgggaaaggctccctgaaaggacagccaggtgacatatatcatcagacatgggcccgctactttgtgaaattccttgatgcctatgcagagcacaagctccaattctgggcagtcaccgcagaaaacgagccctcagctgggctgctgtctggctacccctttcagtgcttgggctttactcctgagcatcaacgggacttcattgcccgggatttggggccaacactggccaacagcacccaccacaatgtaagactcctcatactggatgaccagaggctgctgctccctcattgggccaaggtggtgttgacagacccagaagctgccaaatatgttcatggcatcgctgtccactggtacctggattttttggcccctgcaaaggctactctgggagagacccacagactcttccccgataccatgctgtttgcatcagaagcctgcgtggggagcaaattctgggagcagtctgttaggctgggttcctgggatcggggcatgcaatattcccatagtataataactaacctcctctaccacgtggtaggatggacagactggaatctggctttgaacccagaaggaggccccaattgggtgcgcaactttgttgacagccccatcattgtggatatcacaaaggacaccttctacaaacagcctatgttctatcatctggggcactttagcaagttcattccagagggttcccagagagtaggcttggttgcctcacagaagaatgatctggatgctgtggcactcctgcatcctgacgggagtgcagtggtggtagtactgaacaggtctagcaaagatgttcccttgactatcaaagacccagctgtgggctttctggaaaccatttcccctggatactctatccacacctatctctggagaagacagtaatga

SEQ ID NO: 48 - protein, 536 aa, synthetic construct
  REGION 1..536: note = Variant of B-Glucocerebrosidase
MEFSSPSREECPKPLSRVSIMAASLTGLLLLQAVSWASGARPCIPKSFGYSSVVCVCNATYCDSFDPPTFPALGTFSRYESTRSGRRMELSMGPIQANHTGTGLLLTLQPEQKFQKVKGFGGAMTDAAALNILALSPPAQNLLLKSYFSEEGIGYNIIRVPMASCDFSIRTYTYADTPDDFQLHNFSLPEEDTKLKIPLIHRALQLAQRPVSLLASPWTSPTWLKTNGAVNGKGSLKGQPGDIYHQTWARYFVKFLDAYAEHKLQFWAVTAENEPSAGLLSGYPFQCLGFTPEHQRDFIARDLGPTLANSTHHNVRLLILDDQRLLLPHWAKVVLTDPEAAKYVHGIAVHWYLDFLAPAKATLGETHRLFPDTMLFASEACVGSKFWEQSVRLGSWDRGMQYSHSIITNLLYHVVGWTDWNLALNPEGGPNWVRNFVDSPIIVDITKDTFYKQPMFYHLGHFSKFIPEGSQRVGLVASQKNDLDAVALLHPDGSAVVVVLNRSSKDVPLTIKDPAVGFLETISPGYSIHTYLWRRQ

SEQ ID NO: 49 - DNA, 1614 bp, synthetic construct
  misc_feature 1..1614: note = Variant of B-Glucocerebrosidase
  source 1..1614: mol_type = other DNA
atggagttttcttctcctagtagagaagaatgccccaagccactgagcagggtgagcatcatggctggatccctcacagggctgcttcttttgcaggcagtctcatgggcctctggagccaggccctgtattcccaagtcattcggctactcctcagtggtgtgtgtatgcaatgccacctattgtgacagtctcgatcctccaactttccctgctctgggtaccttctcccggtatgagagcacaagaagtggaagacgcatggagctctcaatgggccctatacaggctaaccacactgggacaggtctgctgctgaccctcgaccctgaacagaagtttcagaaagtcaagggatttggaggagccatgactgatgcagcagcactcaacatcttggccctgtctccaccagcccagaatctgctgttgaagtcctacttctcagaggaggggattggctacaacatcatccgggttcccatggctagctgtgacttctccattaggacctatacatacgctgacacccccgatgattttcagctccataatttcagtctccctgaagaagacaccaaactgaagatacctctgattcacagagccttgcaactggcccaaaggccagtgagcctcttcgcttctccctggactagtcctacatggctgaagactaatggtgctgttaatgggaaaggctccctgaaaggacagccaggtgacaaatatcatcagacatgggcccgctactttgtgaaattccttgatgcctatgcagagcacaagctccaattctgggcagtcaccgcagaaaacgagccctcagctgggctgctgtctggctacccctttcagtgcttgggctttactcctgagcatcaacgggacttcattgcccgggatttggggccaacactggccaacagcacccaccacaatgtaagactcctcatgctggatgaccagaggctgctgctccctcattgggccaaggtggtgttgacagacccagaagctgccaaatatgttcatggcatcgctgtccactggtacctggattttttggcccctgcaaaggctactctgggagagacccacagactcttccccaataccatgctgtttgcatcagaagcctgcgtggggagcaaattctgggagcagtctgttaggctgggttcctgggatcggggcatgcaatattcccatagtataataactaacctcctctaccacgtggtaggatggacagactggaatctggctttgaacccagaaggaggccccaattgggtgcgcaactttgttgacagccccatcattgtggatatcacaaaggacaccttctacaaacagcctatgttctatcatctggggcactttagcaagttcattccagagggttcccagagagtaggcttggttgcctcacagaagaatgatctggatgctgtggcactcatgcatcctgacgggagtgcagtggtggtagtactgaacaggtctagcaaagatgttcccttgactatcaaagacccagctgtgggctttctggaaaccatttcccctggatactctatccacacctatctctggagaagacagtaatga

SEQ ID NO: 50 - protein, 536 aa, synthetic construct
  REGION 1..536: note = Variant of B-Glucocerebrosidase
MEFSSPSREECPKPLSRVSIMAGSLTGLLLLQAVSWASGARPCIPKSFGYSSVVCVCNATYCDSLDPPTFPALGTFSRYESTRSGRRMELSMGPIQANHTGTGLLLTLDPEQKFQKVKGFGGAMTDAAALNILALSPPAQNLLLKSYFSEEGIGYNIIRVPMASCDFSIRTYTYADTPDDFQLHNFSLPEEDTKLKIPLIHRALQLAQRPVSLFASPWTSPTWLKTNGAVNGKGSLKGQPGDKYHQTWARYFVKFLDAYAEHKLQFWAVTAENEPSAGLLSGYPFQCLGFTPEHQRDFIARDLGPTLANSTHHNVRLLMLDDQRLLLPHWAKVVLTDPEAAKYVHGIAVHWYLDFLAPAKATLGETHRLFPNTMLFASEACVGSKFWEQSVRLGSWDRGMQYSHSIITNLLYHVVGWTDWNLALNPEGGPNWVRNFVDSPIIVDITKDTFYKQPMFYHLGHFSKFIPEGSQRVGLVASQKNDLDAVALMHPDGSAVVVVLNRSSKDVPLTIKDPAVGFLETISPGYSIHTYLWRRQ

SEQ ID NO: 51 - DNA, 1614 bp, synthetic construct
  misc_feature 1..1614: note = Variant of B-Glucocerebrosidase
  source 1..1614: mol_type = other DNA
atggagttttcttctcctagtagagaagaatgccccaagccactgagcagggtgagcatcatggctgcatccctcacagggctgcttcttttgcaggcagtctcatgggcctctggagccaggccctgtattcccaagtcattcggctactcctcagtggtgtgtgtatgcaatgccacctattgtgacagtttcgatcctccaactttccctgctctgggtaccttctcccggtatgagagcacaagaagtggaagacgcatggagctctcaatgggccctatacaggctaaccacactgggacaggtctgctgctgaccctccaacctgaacagaagtttcagaaagtcaagggatttggaggagccatgactgatgcagcagcactcaacatcttggccctgtctccaccagcccaggatctgctgttgaagtcctacttctcagaggaggggattggctacaacatcatccgggttcccatggctagctgtgacttctccattaggacctatacatacgctgacacccccgatgattttcagctccataatttcagtctccctgaagaagacaccaaaatgaagatacctctgattcacagagccttgcaactggcacaaaggccagtgagcctcttggcttctccctggactagtcctacatggctgaagactaatggtgctgttaatgggaaaggctccctgaaaggacagccaggtgacatctatcatcagacatgggcccgctactttgtgaaattccttgatgcctatgcagagcacaagctccaattctgggcagtcaccgcagaaaacgagccctcagctgggctgctgtctggctacccctttcagtgcttgggctttactcctgagcatcaacgggacttcattgcccgggatttggggccaacactggccaacagcacccaccacaatgtaagactcctcatgctggatgaccagaggctgctgctccctcattgggccaaggtggtgttgacagacccagaagctgccaaatatgttcatggcatcgctgtccactggtacctggattttttggcccctgcaaaggctactctgggagagacccacagactcttccccaacaccatgctgtttgcatcagaagcctgcgtggggagcaaattctgggagcagtctgttaggctgggttcctgggatcggggcatgcaatattcccatagtataataactaacctcctctaccacgtggtaggatggacagactggaatctggctttgaacccagaaggaggccccaattgggtgcgcaactttgttgacagccccatcattgtggatatcacaaaggacaccttctacaaacagcctatgttctatcatctggggcactttagcaagttcattccagagggttcccagagagtaggcttggttgcctcacagaagaatgatctggatgctgtggcactcatgcatcctgacgggagtgcagtggtggtagtactgaacaggtctagcaaagatgttcccttgactatcaaagacccagctgtgggctttctggaaaccatttcccctggatactctatccacacctatctctggagaagacagtaatga

SEQ ID NO: 52 - protein, 536 aa, synthetic construct
  REGION 1..536: note = Variant of B-Glucocerebrosidase
MEFSSPSREECPKPLSRVSIMAASLTGLLLLQAVSWASGARPCIPKSFGYSSVVCVCNATYCDSFDPPTFPALGTFSRYESTRSGRRMELSMGPIQANHTGTGLLLTLQPEQKFQKVKGFGGAMTDAAALNILALSPPAQDLLLKSYFSEEGIGYNIIRVPMASCDFSIRTYTYADTPDDFQLHNFSLPEEDTKMKIPLIHRALQLAQRPVSLLASPWTSPTWLKTNGAVNGKGSLKGQPGDIYHQTWARYFVKFLDAYAEHKLQFWAVTAENEPSAGLLSGYPFQCLGFTPEHQRDFIARDLGPTLANSTHHNVRLLMLDDQRLLLPHWAKVVLTDPEAAKYVHGIAVHWYLDFLAPAKATLGETHRLFPNTMLFASEACVGSKFWEQSVRLGSWDRGMQYSHSIITNLLYHVVGWTDWNLALNPEGGPNWVRNFVDSPIIVDITKDTFYKQPMFYHLGHFSKFIPEGSQRVGLVASQKNDLDAVALMHPDGSAVVVVLNRSSKDVPLTIKDPAVGFLETISPGYSIHTYLWRRQ

SEQ ID NO: 53 - DNA, 1614 bp, synthetic construct
  misc_feature 1..1614: note = Variant of B-Glucocerebrosidase
  source 1..1614: mol_type = other DNA
atggagttttcttctcctagtagagaagaatgccccaagccactgagcagggtgagcatcatggctggatccctcacagggctgcttcttttgcaggcagtctcatgggcctctggagccaggccctgtattcccaagtcattcggctactcctcagtggtgtgtgtatgcaatgccacctattgtgacagtttcgatcctccaactctccctgctctgggtaccttctcccggtatgagagcacaagaagtggaagacgcatggagctctcaatgggccctatacaggctaaccacactgggacaggtctgctgctgaccctccaacctgaacagaagtttcagaaagtcaagggatttggaggagccatgactgatgcagcagcactcaacatcttggccctgtctccaccagcccagaatctgctgttgaagtcctacttctcagaggaggggattggctacaacatcatccgggttcccatggctagctgtgacttctccattaggacctatacatacgctgacacccccgatgattttcagctccataatttcagtctccctgaagaagacaccaaactgaagatacctctgattcacagagccttgcaactgtcccaaaggccagtgagcctcttcgcttctccctggactagtcctacatggctgaagactaatggtgctgttaatgggaaaggctccctgaaaggacagccaggtgacatatatcatcagacatgggcccgctactttgtgaaattccttgatgcctatgcagagcacaagctccaattctgggcagtcaccgcagaaaacgagccctcagctgggctgctgtctggctacccctttcagtgcttgggctttactcctgagcatcaacgggacttcattgcccgggatttggggccaacactggccaacagcacccaccacaatgtaagactcctcatgctggatgaccagaggctgctgctccctcattgggccaaggtggtgttgacagacccagaagctgccaaatatgttcatggcatcgctgtccactggtacctggattttttggcccctgcaaaggctactctgggagagacccacagactcttccccaataccatgctgtttgcatcagaagcctgcgtggggagcaaattctgggagcagtctgttaggctgggttcctgggatcggggcatgcaatattcccatagtataataactaacctcctctaccacgtggtaggatggacagactggaatctggctttgaacccagaaggaggccccaattgggtgcgcaactttgttgacagccccatcattgtggatatcacaaaggacaccttctacaaacagcctatgttctatcatctggggcactttagcaagttcattccagagggttcccagagagtaggcttggttgcctcacagaagaatgatctggatgctgtggcactcctgcatcctgacgggagtgcagtggtggtagtactgaacaggtctagcaaagatgttcccttgactatcaaagacccagctgtgggctttctggaaaccatttcccctggatactctatccacacctatctctggagaagacagtaatga

SEQ ID NO: 54 - protein, 536 aa, synthetic construct
  REGION 1..536: note = Variant of B-Glucocerebrosidase
MEFSSPSREECPKPLSRVSIMAGSLTGLLLLQAVSWASGARPCIPKSFGYSSVVCVCNATYCDSFDPPTLPALGTFSRYESTRSGRRMELSMGPIQANHTGTGLLLTLQPEQKFQKVKGFGGAMTDAAALNILALSPPAQNLLLKSYFSEEGIGYNIIRVPMASCDFSIRTYTYADTPDDFQLHNFSLPEEDTKLKIPLIHRALQLSQRPVSLFASPWTSPTWLKTNGAVNGKGSLKGQPGDIYHQTWARYFVKFLDAYAEHKLQFWAVTAENEPSAGLLSGYPFQCLGFTPEHQRDFIARDLGPTLANSTHHNVRLLMLDDQRLLLPHWAKVVLTDPEAAKYVHGIAVHWYLDFLAPAKATLGETHRLFPNTMLFASEACVGSKFWEQSVRLGSWDRGMQYSHSIITNLLYHVVGWTDWNLALNPEGGPNWVRNFVDSPIIVDITKDTFYKQPMFYHLGHFSKFIPEGSQRVGLVASQKNDLDAVALLHPDGSAVVVVLNRSSKDVPLTIKDPAVGFLETISPGYSIHTYLWRRQ

SEQ ID NO: 55 - DNA, 1614 bp, synthetic construct
  misc_feature 1..1614: note = Variant of B-Glucocerebrosidase
  source 1..1614: mol_type = other DNA
atggagttttcttctcctagtagagaagaatgccccaagccactgagcagggtgagcatcatggctggatccctcacagggctgcttcttttgcaggcagtctcatgggcctctggagccaggccctgtattcccaagtcattcggctactcctcagtggtgtgtgtatgcaatgccacctattgtgacagtctcgatcctccaactctccctgctctgggtaccttctcccggtatgagagcacaagaagtggaagacgcatggagctctcaatgggccctatacaggctaaccacactgggacaggtctgctgctgaccctccagcctgaacagaagtttcagaaagtcaagggatttggaggagccatgactgatgcagcagcactcaacatcttggccctgtctccaccagcccagaatctgctgttgaagtcctacttctcagaggaggggattggctacaacatcatccgggttcccatggctagctgtgacttctccattaggacctatacatacgctgacacccccgatgattttcagctccataatttcagtctccctgaagaagacaccaaactgaagatacctctgattcacagagccttgcaactggcacaaaggccagtgagcctcttggcttctccctggactagtcctacatggctgaagactaatggtgctgttaatgggaaaggctccctgaaaggacagccaggtgacatctatcatcagacatgggcccgctactttgtgaaattccttgatgcctatgcagagcacaagctcacattctgggcagtcaccgcagaaaacgagccctcagctgggctgctgtctggctacccctttcagtgcttgggctttactcctgagcatcaacgggacttcattgcccgggatttggggccaacactggccaacagcacccaccacaatgtaagactcctcatactggatgaccagaggctgctgctccctcattgggccaaggtggtgttgacagacccagaagctgccaaatatgttcatggcatcgctgtccactggtacctggattttttggcccctgcaaaggctactctgggagagacccacagactcttccccgataccatgctgtttgcatcagaagcctgcgtggggagcaaattctgggagcagtctgttaggctgggttcctgggatcggggcatgcaatattcccatagtataataactaacctcctctaccacgtggtaggatggacagactggaatctggctttgaacccagaaggaggccccaattgggtgcgcaactttgttgacagccccatcattgtggatatcacaaaggacaccttctacaaacagcctatgttctatcatctggggcactttagcaagttcattccagagggttcccagagagtaggcttggttgcctcacagaagaatgatctggatgctgtggcactcatgcatcctgacgggagtgcagtggtggtagtactgaacaggtctagcaaagatgttcccttgactatcaaagacccagctgtgggctttctggaaaccatttcccctggatactctatccacacctatctctggagaagacagtaatga

SEQ ID NO: 56 - protein, 536 aa, synthetic construct
  REGION 1..536: note = Variant of B-Glucocerebrosidase
MEFSSPSREECPKPLSRVSIMAGSLTGLLLLQAVSWASGARPCIPKSFGYSSVVCVCNATYCDSLDPPTLPALGTFSRYESTRSGRRMELSMGPIQANHTGTGLLLTLQPEQKFQKVKGFGGAMTDAAALNILALSPPAQNLLLKSYFSEEGIGYNIIRVPMASCDFSIRTYTYADTPDDFQLHNFSLPEEDTKLKIPLIHRALQLAQRPVSLLASPWTSPTWLKTNGAVNGKGSLKGQPGDIYHQTWARYFVKFLDAYAEHKLTFWAVTAENEPSAGLLSGYPFQCLGFTPEHQRDFIARDLGPTLANSTHHNVRLLILDDQRLLLPHWAKVVLTDPEAAKYVHGIAVHWYLDFLAPAKATLGETHRLFPDTMLFASEACVGSKFWEQSVRLGSWDRGMQYSHSIITNLLYHVVGWTDWNLALNPEGGPNWVRNFVDSPIIVDITKDTFYKQPMFYHLGHFSKFIPEGSQRVGLVASQKNDLDAVALMHPDGSAVVVVLNRSSKDVPLTIKDPAVGFLETISPGYSIHTYLWRRQ

SEQ ID NO: 57 - DNA, 1614 bp, synthetic construct
  misc_feature 1..1614: note = Variant of B-Glucocerebrosidase
  source 1..1614: mol_type = other DNA
atggagttttcttctcctagtagagaagaatgccccaagccactgagcagggtgagcatcatggctggatccctcacagggctgcttcttttgcaggcagtctcatgggcctctggagccaggccctgtattcccaagtcattcggctactcctcagtggtgtgtgtatgcaatgccacctattgtgacagttttgatcctccaactttccctgctctgggtaccttctcccggtatgagagcacaagaagtggaagacgcatggagctctcaatgggccctatacaggctaaccacactgggacaggtctgctgctgaccctccaacctgaacagaagtttcagaaagtcaagggatttggaggagccatgactgatgcagcagcactcaacatcttggccctgtctccaccagcccagaatctgctgttgaagtcctacttctcagaggaggggattggctacaacatcatccgggttcccatggctagctgtgacttctccattaggacctatacatacgctgacacccccgatgattttcagctccataatttcagtctccctgaagaagacaccaaactgaagatacctctgattcacagagccttgcaactggcccaaaggccagtgagcctcttcgcttctccctggactagtcctacatggctgaagactaatggtgctgttaatgggaaaggctccctgaaaggacagccaggtgacatatatcatcagacatgggcccgctactttgtgaaattccttgatgcctatgcagagcacaagctcacattctgggcagtcaccgcagaaaacgagccctcagctgggctgctgtctggctacccctttcagtgcttgggctttactcctgagcatcaacgggacttcattgcccgggatttggggccaacactggccaacagcacccaccacaatgtaagactcctcatgctggatgaccagaggctgctgctccctcattgggccaaggtggtgttgacagacccagaagctgccaaatatgttcatggcatcgctgtccactggtacctggattttttggcccctgcaaaggctactctgggagagacccacagactcttccccaataccatgctgtttgcatcagaagcctgcgtggggagcaaattctgggagcagtctgttaggctgggttcctgggatcggggcatgcaatattcccatagtataataactaacctcctctaccacgtggtaggatggacagactggaatctggctttgaacccagaaggaggccccaattgggtgcgcaactttgttgacagccccatcattgtggatatcacaaaggacaccttctacaaacagcctatgttctatcatctggggcactttagcaagttcattccagagggttcccagagagtaggcttggttgcctcacagaagaatgatctggatgctgtggcactcatgcatcctgacgggagtgcagtggtggtagtactgaacaggtctagcaaagatgttcccttgactatcaaagacccagctgtgggctttctggaaaccatttcccctggatactctatccacacctatctctggagaagacagtaatga

SEQ ID NO: 58 - protein, 536 aa, synthetic construct
  REGION 1..536: note = Variant of B-Glucocerebrosidase
MEFSSPSREECPKPLSRVSIMAGSLTGLLLLQAVSWASGARPCIPKSFGYSSVVCVCNATYCDSFDPPTFPALGTFSRYESTRSGRRMELSMGPIQANHTGTGLLLTLQPEQKFQKVKGFGGAMTDAAALNILALSPPAQNLLLKSYFSEEGIGYNIIRVPMASCDFSIRTYTYADTPDDFQLHNFSLPEEDTKLKIPLIHRALQLAQRPVSLFASPWTSPTWLKTNGAVNGKGSLKGQPGDIYHQTWARYFVKFLDAYAEHKLTFWAVTAENEPSAGLLSGYPFQCLGFTPEHQRDFIARDLGPTLANSTHHNVRLLMLDDQRLLLPHWAKVVLTDPEAAKYVHGIAVHWYLDFLAPAKATLGETHRLFPNTMLFASEACVGSKFWEQSVRLGSWDRGMQYSHSIITNLLYHVVGWTDWNLALNPEGGPNWVRNFVDSPIIVDITKDTFYKQPMFYHLGHFSKFIPEGSQRVGLVASQKNDLDAVALMHPDGSAVVVVLNRSSKDVPLTIKDPAVGFLETISPGYSIHTYLWRRQ

SEQ ID NO: 59 - DNA, 1614 bp, synthetic construct
  misc_feature 1..1614: note = Variant of B-Glucocerebrosidase
  source 1..1614: mol_type = other DNA
atggagttttcttctcctagtagagaagaatgccccaagccactgagcagggtgagcatcatggctggctccctcacagggctgcttcttttgcaggcagtctcatgggcctctggagccaggccctgtattcccaagtcattcggctactcctcagtggtgtgtgtatgcaatgccacctattgtgacagttttgatcctccaactttccctgctctgggtaccttctcccggtatgagagcacaagaagtggaagacgcatggagctctcaatgggccctatacaggctaaccacactgggacaggtctgctgctgaccctccagcctgaacagaagtttcagaaagtcaagggatttggaggagccatgactgatgcagcagcactcaacatcttggccctgtctccaccagcccagaatctgctgttgaagtcctacttctcagaggaggggattggctacaacatcatccgggttcccatggctagctgtgacttctccattaggacctatacatacgctgacacccccgatgattttcagctccataatttcagtctccctgaagaagacaccaaactgaagatacctctgattcacagagccttgcaactggcacaaaggccagtgagcctcttggcttctccctggactagtcctacatggctgaagactaatggtgctgttaatgggaaaggctccctgaaaggacagccaggtgacatatatcatcagacatgggcccgctactttgtgaaattccttgatgcctatgcagagcacaagctcacattctgggcagtcaccgcagaaaacgagccctcagctgggctgctgtctggctacccctttcagtgcttgggctttactcctgagcatcaacgggacttcattgcccgggatttggggccaacactggccaacagcacccaccacaatgtaagactcctcatactggatgaccagaggctgctgctccctcattgggccaaggtggtgttgacagacccagaagctgccaaatatgttcatggcatcgctgtccactggtacctggattttttggcccctgcaaaggctactctgggagagacccacagactcttccccaacaccatgctgtttgcatcagaagcctgcgtggggagcaaattctgggagcagtctgttaggctgggttcctgggatcggggcatgcaatattcccatagtataataactaacctcctctaccacgtggtaggatggacagactggaatctggctttgaacccagaaggaggccccaattgggtgcgcaactttgttgacagccccatcattgtggatatcacaaaggacaccttctacaaacagcctatgttctatcatctggggcactttagcaagttcattccagagggttcccagagagtaggcttggttgcctcacagaagaatgatctggatgctgtggcactcatgcatcctgacgggagtgcagtggtggtagtactgaacaggtctagcaaagatgttcccttgactatcaaagacccagctgtgggctttctggaaaccatttcccctggatactctatccacacctatctctggagaagacagtaatga

SEQ ID NO: 60 - protein, 536 aa, synthetic construct
  REGION 1..536: note = Variant of B-Glucocerebrosidase
MEFSSPSREECPKPLSRVSIMAGSLTGLLLLQAVSWASGARPCIPKSFGYSSVVCVCNATYCDSFDPPTFPALGTFSRYESTRSGRRMELSMGPIQANHTGTGLLLTLQPEQKFQKVKGFGGAMTDAAALNILALSPPAQNLLLKSYFSEEGIGYNIIRVPMASCDFSIRTYTYADTPDDFQLHNFSLPEEDTKLKIPLIHRALQLAQRPVSLLASPWTSPTWLKTNGAVNGKGSLKGQPGDIYHQTWARYFVKFLDAYAEHKLTFWAVTAENEPSAGLLSGYPFQCLGFTPEHQRDFIARDLGPTLANSTHHNVRLLILDDQRLLLPHWAKVVLTDPEAAKYVHGIAVHWYLDFLAPAKATLGETHRLFPNTMLFASEACVGSKFWEQSVRLGSWDRGMQYSHSIITNLLYHVVGWTDWNLALNPEGGPNWVRNFVDSPIIVDITKDTFYKQPMFYHLGHFSKFIPEGSQRVGLVASQKNDLDAVALMHPDGSAVVVVLNRSSKDVPLTIKDPAVGFLETISPGYSIHTYLWRRQ

SEQ ID NO: 61 - DNA, 1614 bp, synthetic construct
  misc_feature 1..1614: note = Variant of B-Glucocerebrosidase
  source 1..1614: mol_type = other DNA
atggagttttcttctcctagtagagaagaatgccccaagccactgagcagggtgagcatcatggctggatccctcacagggctgcttcttttgcaggcagtctcatgggcctctggagccaggccctgtattcccaagtcattcggctactcctcagtggtgtgtgtatgcaatgccacctattgtgacagtctcgatcctccaactttccctgctctgggtaccttctcccggtatgagagcacaagaagtggaagacgcatggagctctcaatgggccctatacaggctaaccacactgggacaggtctgctgctgaccctccaacctgaacagaagtttcagaaagtcaagggatttggaggagccatgactgatgcagcagcactcaacatcttggccctgtctccaccagcccagaatctgctgttgaagtcctacttctcagaggaggggattggctacaacatcatccgggttcccatggctagctgtgacttctccattaggacctatacatacgctgacacccccgatgattttcagctccataatttcagtctccctgaagaagacaccaaactgaagatacctctgattcacagagccttgcaactggcacaaaggccagtgagcctcttggcttctccctggactagtcctacatggctgaagactaatggtgctgttaatgggaaaggctccctgaaaggacagccaggtgacaaatatcatcagacatgggcccgctactttgtgaaattccttgatgcctatgcagagcacaagctccagttctgggcagtcaccgcagaaaacgagccctcagctgggctgctgtctggctacccctttcagtgcttgggctttactcctgagcatcaacgggacttcattgcccgggatttggggccaacactggccaacagcacccaccacaatgtaagactcctcatgctggatgaccagaggctgctgctccctcattgggccaaggtggtgttgacagacccagaagctgccaaatatgttcatggcatcgctgtccactggtacctggattttttggcccctgcaaaggctactctgggagagacccacagactcttccccaataccatgctgtttgcatcagaagcctgcgtggggagcaaattctgggagcagtctgttaggctgggttcctgggatcggggcatgcaatattcccatagtataataactaacctcctctaccacgtggtaggatggacagactggaatctggctttgaacccagaaggaggccccaattgggtgcgcaactttgttgacagccccatcattgtggatatcacaaaggacaccttctacaaacagcctatgttctatcatctggggcactttagcaagttcattccagagggttcccagagagtaggcttggttgcctcacagaagaatgatctggatgctgtggcactcatgcatcctgacgggagtgcagtggtggtagtactgaacaggtctagcaaagatgttcccttgactatcaaagacccagctgtgggctttctggaaaccatttcccctggatactctatccacacctatctctggagaagacagtaatga

SEQ ID NO: 62 - protein, 536 aa, synthetic construct
  REGION 1..536: note = Variant of B-Glucocerebrosidase
MEFSSPSREECPKPLSRVSIMAGSLTGLLLLQAVSWASGARPCIPKSFGYSSVVCVCNATYCDSLDPPTFPALGTFSRYESTRSGRRMELSMGPIQANHTGTGLLLTLQPEQKFQKVKGFGGAMTDAAALNILALSPPAQNLLLKSYFSEEGIGYNIIRVPMASCDFSIRTYTYADTPDDFQLHNFSLPEEDTKLKIPLIHRALQLAQRPVSLLASPWTSPTWLKTNGAVNGKGSLKGQPGDKYHQTWARYFVKFLDAYAEHKLQFWAVTAENEPSAGLLSGYPFQCLGFTPEHQRDFIARDLGPTLANSTHHNVRLLMLDDQRLLLPHWAKVVLTDPEAAKYVHGIAVHWYLDFLAPAKATLGETHRLFPNTMLFASEACVGSKFWEQSVRLGSWDRGMQYSHSIITNLLYHVVGWTDWNLALNPEGGPNWVRNFVDSPIIVDITKDTFYKQPMFYHLGHFSKFIPEGSQRVGLVASQKNDLDAVALMHPDGSAVVVVLNRSSKDVPLTIKDPAVGFLETISPGYSIHTYLWRRQ

SEQ ID NO: 63 - DNA, 1614 bp, synthetic construct
  misc_feature 1..1614: note = Variant of B-Glucocerebrosidase
  source 1..1614: mol_type = other DNA
atggagttttcttctcctagtagagaagaatgccccaagccactgagcagggtgagcatcatggctggatccctcacagggctgcttcttttgcaggcagtctcatgggcctctggagccaggccctgtattcccaagtcattcggctactcctcagtggtgtgtgtatgcaatgccacctattgtgacagtctcgatcctccaactctccctgctctgggtaccttctcccggtatgagagcacaagaagtggaagacgcatggagctctcaatgggcccaatacaggctaaccacactgggacaggtctgctgctgaccctccaacctgaacagaagtttcagaaagtcaagggatttggaggagccatgactgatgcagcagcactcaacatcttggccctgtctccaccagcccagaatctgctgttgaagtcctacttctcagaggaggggattggctacaacatcatccgggttcccatggctagctgtgacttctccattaggacctatacatacgctgacacccccgatgattttcagctccataatttcagtctccctgaagaagacaccaaaatgaagatacctctgattcacagagccttgcaactggcacaaaggccagtgagcctcttggcttctccctggactagtcctacatggctgaagactaatggtgctgttaatgggaaaggctccctgaaaggacagccaggtgacatctatcatcagacatgggcccgctactttgtgaaattccttgatgcctatgcagagcacaagctccagttctgggcagtcaccgcagaaaacgagccctcagctgggctgctgtctggctacccctttcagtgcttgggctttactcctgagcatcaacgggacttcattgcccgggatttggggccaacactggccaacagcacccaccacaatgtaagactcctcatgctggatgaccagaggctgctgctccctcattgggccaaggtggtgttgacagacccagaagctgccaaatatgttcatggcatcgctgtccactggtacctggattttttggcccctgcaaaggctactctgggagagacccacagactcttccccaacaccatgctgtttgcatcagaagcctgcgtggggagcaaattctgggagcagtctgttaggctgggttcctgggatcggggcatgcaatattcccatagtataataactaacctcctctaccacgtggtaggatggacagactggaatctggctttgaacccagaaggaggccccaattgggtgcgcaactttgttgacagccccatcattgtggatatcacaaaggacaccttctacaaacagcctatgttctatcatctggggcactttagcaagttcattccagagggttcccagagagtaggcttggttgcctcacagaagaatgatctggatgctgtggcactcatgcatcctgacgggagtgcagtggtggtagtactgaacaggtctagcaaagatgttcccttgactatcaaagacccagctgtgggctttctggaaaccatttcccctggatactctatccacacctatctctggagaagacagtaatga

SEQ ID NO: 64 - protein, 536 aa, synthetic construct
  REGION 1..536: note = Variant of B-Glucocerebrosidase
MEFSSPSREECPKPLSRVSIMAGSLTGLLLLQAVSWASGARPCIPKSFGYSSVVCVCNATYCDSLDPPTLPALGTFSRYESTRSGRRMELSMGPIQANHTGTGLLLTLQPEQKFQKVKGFGGAMTDAAALNILALSPPAQNLLLKSYFSEEGIGYNIIRVPMASCDFSIRTYTYADTPDDFQLHNFSLPEEDTKMKIPLIHRALQLAQRPVSLLASPWTSPTWLKTNGAVNGKGSLKGQPGDIYHQTWARYFVKFLDAYAEHKLQFWAVTAENEPSAGLLSGYPFQCLGFTPEHQRDFIARDLGPTLANSTHHNVRLLMLDDQRLLLPHWAKVVLTDPEAAKYVHGIAVHWYLDFLAPAKATLGETHRLFPNTMLFASEACVGSKFWEQSVRLGSWDRGMQYSHSIITNLLYHVVGWTDWNLALNPEGGPNWVRNFVDSPIIVDITKDTFYKQPMFYHLGHFSKFIPEGSQRVGLVASQKNDLDAVALMHPDGSAVVVVLNRSSKDVPLTIKDPAVGFLETISPGYSIHTYLWRRQ

SEQ ID NO: 65 - DNA, 1614 bp, synthetic construct
  misc_feature 1..1614: note = Variant of B-Glucocerebrosidase
  source 1..1614: mol_type = other DNA
atggagttttcttctcctagtagagaagaatgccccaagccactgagcagggtgagcatcatggctggctccctcacagggctgcttcttttgcaggcagtctcatgggcctctggagccaggccctgtattcccaagtcattcggctactcctcagtggtgtgtgtatgcaatgccacctattgtgacagttttgatcctccaactttccctgctctgggtaccttctcccggtatgagagcacaagaagtggaagacgcatggagctctcaatgggcccaatacaggctaaccacactgggacaggtctgctgctgaccctccaacctgaacagaagtttcagaaagtcaagggatttggaggagccatgactgatgcagcagcactcaacatcttggccctgtctccaccagcccagaatctgctgttgaagtcctacttctcagaggaggggattggctacaacatcatccgggttcccatggctagctgtgacttctccattaggacctatacatacgctgacacccccgatgattttcagctccataatttcagtctccctgaagaagacaccaaactgaagatacctctgattcacagagccttgcaactggcacaaaggccagtgagcctcttggcttctccctggactagtcctacatggctgaagactaatggtgctgttaatgggaaaggctccctgaaaggacagccaggtgacatctatcatcagacatgggcccgctactttgtgaaattccttgatgcctatgcagagcacaagctccagttctgggcagtcaccgcagaaaacgagccctcagctgggctgctgtctggctacccctttcagtgcttgggctttactcctgagcatcaacgggacttcattgcccgggatttggggccaacactggccaacagcacccaccacaatgtaagactcctcatgctggatgaccagaggctgctgctccctcattgggccaaggtggtgttgacagacccagaagctgccaaatatgttcatggcatcgctgtccactggtacctggattttttggcccctgcaaaggctactctgggagagacccacagactcttccccaataccatgctgtttgcatcagaagcctgcgtggggagcaaattctgggagcagtctgttaggctgggttcctgggatcggggcatgcaatattcccatagtataataactaacctcctctaccacgtggtaggatggacagactggaatctggctttgaacccagaaggaggccccaattgggtgcgcaactttgttgacagccccatcattgtggatatcacaaaggacaccttctacaaacagcctatgttctatcatctggggcactttagcaagttcattccagagggttcccagagagtaggcttggttgcctcacagaagaatgatctggatgctgtggcactcctgcatcctgacgggagtgcagtggtggtagtactgaacaggtctagcaaagatgttcccttgactatcaaagacccagctgtgggctttctggaaaccatttcccctggatactctatccacacctatctctggagaagacagtaatga

SEQ ID NO: 66 - protein, 536 aa, synthetic construct
  REGION 1..536: note = Variant of B-Glucocerebrosidase
MEFSSPSREECPKPLSRVSIMAGSLTGLLLLQAVSWASGARPCIPKSFGYSSVVCVCNATYCDSFDPPTFPALGTFSRYESTRSGRRMELSMGPIQANHTGTGLLLTLQPEQKFQKVKGFGGAMTDAAALNILALSPPAQNLLLKSYFSEEGIGYNIIRVPMASCDFSIRTYTYADTPDDFQLHNFSLPEEDTKLKIPLIHRALQLAQRPVSLLASPWTSPTWLKTNGAVNGKGSLKGQPGDIYHQTWARYFVKFLDAYAEHKLQFWAVTAENEPSAGLLSGYPFQCLGFTPEHQRDFIARDLGPTLANSTHHNVRLLMLDDQRLLLPHWAKVVLTDPEAAKYVHGIAVHWYLDFLAPAKATLGETHRLFPNTMLFASEACVGSKFWEQSVRLGSWDRGMQYSHSIITNLLYHVVGWTDWNLALNPEGGPNWVRNFVDSPIIVDITKDTFYKQPMFYHLGHFSKFIPEGSQRVGLVASQKNDLDAVALLHPDGSAVVVVLNRSSKDVPLTIKDPAVGFLETISPGYSIHTYLWRRQ

SEQ ID NO: 67 - DNA, 1614 bp, synthetic construct
  misc_feature 1..1614: note = Variant of B-Glucocerebrosidase
  source 1..1614: mol_type = other DNA
atggagttttcttctcctagtagagaagaatgccccaagccactgagcagggtgagcatcatggctgcatccctcacagggctgcttcttttgcaggcagtctcatgggcctctggagccaggccctgtattcccaagtcattcggctactcctcagtggtgtgtgtatgcaatgccacctattgtgacagtctcgatcctccaactttccctgctctgggtaccttctcccggtatgagagcacaagaagtggaagacgcatggagctctcaatgggcccaatacaggctaaccacactgggacaggtctgctgctgaccctccaacctgaacagaagtttcagaaagtcaagggatttggaggagccatgactgatgcagcagcactcaacatcttggccctgtctccaccagcccaggatctgctgttgaagtcctacttctcagaggaggggattggctacaacatcatccgggttcccatggctagctgtgacttctccattaggacctatacatacgctgacacccccgatgattttcagctccataatttcagtctccctgaagaagacaccaaactgaagatacctctgattcacagagccttgcaactggcacaaaggccagtgagcctcttggcttctccctggactagtcctacatggctgaagactaatggtgctgttaatgggaaaggctccctgaaaggacagccaggtgacatatatcatcagacatgggcccgctactttgtgaaattccttgatgcctatgcagagcacaagctccagttctgggcagtcaccgcagaaaacgagccctcagctgggctgctgtctggctacccctttcagtgcttgggctttactcctgagcatcaacgggacttcattgcccgggatttggggccaacactggccaacagcacccaccacaatgtaagactcctcatgctggatgaccagaggctgctgctccctcattgggccaaggtggtgttgacagacccagaagctgccaaatatgttcatggcatcgctgtccactggtacctggattttttggcccctgcaaaggctactctgggagagacccacagactcttccccaataccatgctgtttgcatcagaagcctgcgtggggagcaaattctgggagcagtctgttaggctgggttcctgggatcggggcatgcaatattcccatagtataataactaacctcctctaccacgtggtaggatggacagactggaatctggctttgaacccagaaggaggccccaattgggtgcgcaactttgttgacagccccatcattgtggatatcacaaaggacaccttctacaaacagcctatgttctatcatctggggcactttagcaagttcattccagagggttcccagagagtaggcttggttgcctcacagaagaatgatctggatgctgtggcactcatgcatcctgacgggagtgcagtggtggtagtactgaacaggtctagcaaagatgttcccttgactatcaaagacccagctgtgggctttctggaaaccatttcccctggatactctatccacacctatctctggagaagacagtaatga

SEQ ID NO: 68 - protein, 536 aa, synthetic construct
  REGION 1..536: note = Variant of B-Glucocerebrosidase
MEFSSPSREECPKPLSRVSIMAASLTGLLLLQAVSWASGARPCIPKSFGYSSVVCVCNATYCDSLDPPTFPALGTFSRYESTRSGRRMELSMGPIQANHTGTGLLLTLQPEQKFQKVKGFGGAMTDAAALNILALSPPAQDLLLKSYFSEEGIGYNIIRVPMASCDFSIRTYTYADTPDDFQLHNFSLPEEDTKLKIPLIHRALQLAQRPVSLLASPWTSPTWLKTNGAVNGKGSLKGQPGDIYHQTWARYFVKFLDAYAEHKLQFWAVTAENEPSAGLLSGYPFQCLGFTPEHQRDFIARDLGPTLANSTHHNVRLLMLDDQRLLLPHWAKVVLTDPEAAKYVHGIAVHWYLDFLAPAKATLGETHRLFPNTMLFASEACVGSKFWEQSVRLGSWDRGMQYSHSIITNLLYHVVGWTDWNLALNPEGGPNWVRNFVDSPIIVDITKDTFYKQPMFYHLGHFSKFIPEGSQRVGLVASQKNDLDAVALMHPDGSAVVVVLNRSSKDVPLTIKDPAVGFLETISPGYSIHTYLWRRQ

SEQ ID NO: 69 - DNA, 1614 bp, synthetic construct
  misc_feature 1..1614: note = Variant of B-Glucocerebrosidase
  source 1..1614: mol_type = other DNA
atggagttttcttctcctagtagagaagaatgccccaagccactgagcagggtgagcatcatggctgcatccctcacagggctgcttcttttgcaggcagtctcatgggcctctggagccaggccctgtattcccaagtcattcggctactcctcagtggtgtgtgtatgcaatgccacctattgtgacagtttcgatcctccaactttccctgctctgggtaccttctcccggtatgagagcacaagaagtggaagacgcatggagctctcaatgggccctatacaggctaaccacactgggacaggtctgctgctgaccctccagcctgaacagaagtttcagaaagtcaagggatttggaggagccatgactgatgcagcagcactcaacatcttggccctgtctccaccagcccagaatctgctgttgaagtcctacttctcagaggaggggattggctacaacatcatccgggttcccatggctagctgtgacttctccattaggacctatacatacgctgacacccccgatgattttcagctccataatttcagtctccctgaagaagacaccaaactgaagatacctctgattcacagagccttgcaactggcacaaaggccagtgagcctcttggcttctccctggactagtcctacatggctgaagactaatggtgctgttaatgggaaaggctccctgaaaggacagccaggtgacatctatcatcagacatgggcccgctactttgtgaaattccttgatgcctatgcagagcacaagctccagttctgggcagtcaccgcagaaaacgagccctcagctgggctgctgtctggctacccctttcagtgcttgggctttactcctgagcatcaacgggacttcattgcccgggatttggggccaacactggccaacagcacccaccacaatgtaagactcctcatgctggatgaccagaggctgctgctccctcattgggccaaggtggtgttgacagacccagaagctgccaaatatgttcatggcatcgctgtccactggtacctggattttttggcccctgcaaaggctactctgggagagacccacagactcttccccgataccatgctgtttgcatcagaagcctgcgtggggagcaaattctgggagcagtctgttaggctgggttcctgggatcggggcatgcaatattcccatagtataataactaacctcctctaccacgtggtaggatggacagactggaatctggctttgaacccagaaggaggccccaattgggtgcgcaactttgttgacagccccatcattgtggatatcacaaaggacaccttctacaaacagcctatgttctatcatctggggcactttagcaagttcattccagagggttcccagagagtaggcttggttgcctcacagaagaatgatctggatgctgtggcactcatgcatcctgacgggagtgcagtggtggtagtactgaacaggtctagcaaagatgttcccttgactatcaaagacccagctgtgggctttctggaaaccatttcccctggatactctatccacacctatctctggagaagacagtaatga

SEQ ID NO: 70 - protein, 536 aa, synthetic construct
  REGION 1..536: note = Variant of B-Glucocerebrosidase
MEFSSPSREECPKPLSRVSIMAASLTGLLLLQAVSWASGARPCIPKSFGYSSVVCVCNATYCDSFDPPTFPALGTFSRYESTRSGRRMELSMGPIQANHTGTGLLLTLQPEQKFQKVKGFGGAMTDAAALNILALSPPAQNLLLKSYFSEEGIGYNIIRVPMASCDFSIRTYTYADTPDDFQLHNFSLPEEDTKLKIPLIHRALQLAQRPVSLLASPWTSPTWLKTNGAVNGKGSLKGQPGDIYHQTWARYFVKFLDAYAEHKLQFWAVTAENEPSAGLLSGYPFQCLGFTPEHQRDFIARDLGPTLANSTHHNVRLLMLDDQRLLLPHWAKVVLTDPEAAKYVHGIAVHWYLDFLAPAKATLGETHRLFPDTMLFASEACVGSKFWEQSVRLGSWDRGMQYSHSIITNLLYHVVGWTDWNLALNPEGGPNWVRNFVDSPIIVDITKDTFYKQPMFYHLGHFSKFIPEGSQRVGLVASQKNDLDAVALMHPDGSAVVVVLNRSSKDVPLTIKDPAVGFLETISPGYSIHTYLWRRQ

SEQ ID NO: 71 - DNA, 1614 bp, synthetic construct
  misc_feature 1..1614: note = Variant of B-Glucocerebrosidase
  source 1..1614: mol_type = other DNA
atggagttttcttctcctagtagagaagaatgccccaagccactgagcagggtgagcatcatggctggatccctcacagggctgcttcttttgcaggcagtctcatgggcctctggagccaggccctgtattcccaagtcattcggctactcctcagtggtgtgtgtatgcaatgccacctattgtgacagtttcgatcctccaactctccctgctctgggtaccttctcccggtatgagagcacaagaagtggaagacgcatggagctctcaatgggccctatacaggctaaccacactgggacaggtctgctgctgaccctccagcctgaacagaagtttcagaaagtcaagggatttggaggagccatgactgatgcagcagcactcaacatcttggccctgtctccaccagcccaggatctgctgttgaagtcctacttctcagaggaggggattggctacaacatcatccgggttcccatggctagctgtgacttctccattaggacctatacatacgctgacacccccgatgattttcagctccataatttcagtctccctgaagaagacaccaaactgaagatacctctgattcacagagccttgcaactggcacaaaggccagtgagcctcttggcttctccctggactagtcctacatggctgaagactaatggtgctgttaatgggaaaggctccctgaaaggacagccaggtgacatatatcatcagacatgggcccgctactttgtgaaattccttgatgcctatgcagagcacaagctccagttctgggcagtcaccgcagaaaacgagccctcagctgggctgctgtctggctacccctttcagtgcttgggctttactcctgagcatcaacgggacttcattgcccgggatttggggccaacactggccaacagcacccaccacaatgtaagactcctcatgctggatgaccagaggctgctgctccctcattgggccaaggtggtgttgacagacccagaagctgccaaatatgttcatggcatcgctgtccactggtacctggattttttggcccctgcaaaggctactctgggagagacccacagactcttccccaacaccatgctgtttgcatcagaagcctgcgtggggagcaaattctgggagcagtctgttaggctgggttcctgggatcggggcatgcaatattcccatagtataataactaacctcctctaccacgtggtaggatggacagactggaatctggctttgaacccagaaggaggccccaattgggtgcgcaactttgttgacagccccatcattgtggatatcacaaaggacaccttctacaaacagcctatgttctatcatctggggcactttagcaagttcattccagagggttcccagagagtaggcttggttgcctcacagaagaatgatctggatgctgtggcactcatgcatcctgacgggagtgcagtggtggtagtactgaacaggtctagcaaagatgttcccttgactatcaaagacccagctgtgggctttctggaaaccatttcccctggatactctatccacacctatctctggagaagacagtaatga

SEQ ID NO: 72 - protein, 536 aa, synthetic construct
  REGION 1..536: note = Variant of B-Glucocerebrosidase
MEFSSPSREECPKPLSRVSIMAGSLTGLLLLQAVSWASGARPCIPKSFGYSSVVCVCNATYCDSFDPPTLPALGTFSRYESTRSGRRMELSMGPIQANHTGTGLLLTLQPEQKFQKVKGFGGAMTDAAALNILALSPPAQDLLLKSYFSEEGIGYNIIRVPMASCDFSIRTYTYADTPDDFQLHNFSLPEEDTKLKIPLIHRALQLAQRPVSLLASPWTSPTWLKTNGAVNGKGSLKGQPGDIYHQTWARYFVKFLDAYAEHKLQFWAVTAENEPSAGLLSGYPFQCLGFTPEHQRDFIARDLGPTLANSTHHNVRLLMLDDQRLLLPHWAKVVLTDPEAAKYVHGIAVHWYLDFLAPAKATLGETHRLFPNTMLFASEACVGSKFWEQSVRLGSWDRGMQYSHSIITNLLYHVVGWTDWNLALNPEGGPNWVRNFVDSPIIVDITKDTFYKQPMFYHLGHFSKFIPEGSQRVGLVASQKNDLDAVALMHPDGSAVVVVLNRSSKDVPLTIKDPAVGFLETISPGYSIHTYLWRRQ

SEQ ID NO: 73 - DNA, 1614 bp, synthetic construct
  misc_feature 1..1614: note = Variant of B-Glucocerebrosidase
  source 1..1614: mol_type = other DNA
atggagttttcttctcctagtagagaagaatgccccaagccactgagcagggtgagcatcatggctgcatccctcacagggctgcttcttttgcaggcagtctcatgggcctctggagccaggccctgtattcccaagtcattcggctactcctcagtggtgtgtgtatgcaatgccacctattgtgacagttttgatcctccaactttccctgctctgggtaccttctcccggtatgagagcacaagaagtggaagacgcatggagctctcaatgggcccaatacaggctaaccacactgggacaggtctgctgctgaccctccaacctgaacagaagtttcagaaagtcaagggatttggaggagccatgactgatgcagcagcactcaacatcttggccctgtctccaccagcccagaatctgctgttgaagtcctacttctcagaggaggggattggctacaacatcatccgggttcccatggctagctgtgacttctccattaggacctatacatacgctgacacccccgatgattttcagctccataatttcagtctccctgaagaagacaccaaaatgaagatacctctgattcacagagccttgcaactggcacaaaggccagtgagcctcttggcttctccctggactagtcctacatggctgaagactaatggtgctgttaatgggaaaggctccctgaaaggacagccaggtgacatatatcatcagacatgggcccgctactttgtgaaattccttgatgcctatgcagagcacaagctccagttctgggcagtcaccgcagaaaacgagccctcagctgggctgctgtctggctacccctttcagtgcttgggctttactcctgagcatcaacgggacttcattgcccgggatttggggccaacactggccaacagcacccaccacaatgtaagactcctcatgctggatgaccagaggctgctgctccctcattgggccaaggtggtgttgacagacccagaagctgccaaatatgttcatggcatcgctgtccactggtacctggattttttggcccctgcaaaggctactctgggagagacccacagactcttccccaacaccatgctgtttgcatcagaagcctgcgtggggagcaaattctgggagcagtctgttaggctgggttcctgggatcggggcatgcaatattcccatagtataataactaacctcctctaccacgtggtaggatggacagactggaatctggctttgaacccagaaggaggccccaattgggtgcgcaactttgttgacagccccatcattgtggatatcacaaaggacaccttctacaaacagcctatgttctatcatctggggcactttagcaagttcattccagagggttcccagagagtaggcttggttgcctcacagaagaatgatctggatgctgtggcactcatgcatcctgacgggagtgcagtggtggtagtactgaacaggtctagcaaagatgttcccttgactatcaaagacccagctgtgggctttctggaaaccatttcccctggatactctatccacacctatctctggagaagacagtaatga

SEQ ID NO: 74 - protein, 536 aa, synthetic construct
  REGION 1..536: note = Variant of B-Glucocerebrosidase
MEFSSPSREECPKPLSRVSIMAASLTGLLLLQAVSWASGARPCIPKSFGYSSVVCVCNATYCDSFDPPTFPALGTFSRYESTRSGRRMELSMGPIQANHTGTGLLLTLQPEQKFQKVKGFGGAMTDAAALNILALSPPAQNLLLKSYFSEEGIGYNIIRVPMASCDFSIRTYTYADTPDDFQLHNFSLPEEDTKMKIPLIHRALQLAQRPVSLLASPWTSPTWLKTNGAVNGKGSLKGQPGDIYHQTWARYFVKFLDAYAEHKLQFWAVTAENEPSAGLLSGYPFQCLGFTPEHQRDFIARDLGPTLANSTHHNVRLLMLDDQRLLLPHWAKVVLTDPEAAKYVHGIAVHWYLDFLAPAKATLGETHRLFPNTMLFASEACVGSKFWEQSVRLGSWDRGMQYSHSIITNLLYHVVGWTDWNLALNPEGGPNWVRNFVDSPIIVDITKDTFYKQPMFYHLGHFSKFIPEGSQRVGLVASQKNDLDAVALMHPDGSAVVVVLNRSSKDVPLTIKDPAVGFLETISPGYSIHTYLWRRQ

SEQ ID NO: 75 - DNA, 1614 bp, synthetic construct
  misc_feature 1..1614: note = Variant of B-Glucocerebrosidase
  source 1..1614: mol_type = other DNA
atggagttttcttctcctagtagagaagaatgccccaagccactgagcagggtgagcatcatggctggatccctcacagggctgcttcttttgcaggcagtctcatgggcctctggagccaggccctgtattcccaagtcattcggctactcctcagtggtgtgtgtatgcaatgccacctattgtgacagttttgatcctccaactttccctgctctgggtaccttctcccggtatgagagcacaagaagtggaagacgcatggagctctcaatgggccctatacaggctaaccacactgggacaggtctgctgctgaccctccagcctgaacagaagtttcagaaagtcaagggatttggaggagccatgactgatgcagcagcactcaacatcttggccctgtctccaccagcccagaatctgctgttgaagtcctacttctcagaggaggggattggctacaacatcatccgggttcccatggctagctgtgacttctccattaggacctatacatacgctgacacccccgatgattttcagctccataatttcagtctccctgaagaagacaccaaactgaagatacctctgattcacagagccttgcaactggcccaaaggccagtgagcctcttcgcttctccctggactagtcctacatggctgaagactaatggtgctgttaatgggaaaggctccctgaaaggacagccaggtgacatatatcatcagacatgggcccgctactttgtgaaattccttgatgcctatgcagagcacaagctccaattctgggcagtcaccgcagaaaacgagccctcagctgggctgctgtctggctacccctttcagtgcttgggctttactcctgagcatcaacgggacttcattgcccgggatttggggccaacactggccaacagcacccaccacaatgtaagactcctcatactggatgaccagaggctgctgctccctcattgggccaaggtggtgttgacagacccagaagctgccaaatatgttcatggcatcgctgtccactggtacctggattttttggcccctgcaaaggctactctgggagagacccacagactcttccccaataccatgctgtttgcatcagaagcctgcgtggggagcaaattctgggagcagtctgttaggctgggttcctgggatcggggcatgcaatattcccatagtataataactaacctcctctaccacgtggtaggatggacagactggaatctggctttgaacccagaaggaggccccaattgggtgcgcaactttgttgacagccccatcattgtggatatcacaaaggacaccttctacaaacagcctatgttctatcatctggggcactttagcaagttcattccagagggttcccagagagtaggcttggttgcctcacagaagaatgatctggatgctgtggcactcatgcatcctgacgggagtgcagtggtggtagtactgaacaggtctagcaaagatgttcccttgactatcaaagacccagctgtgggctttctggaaaccatttcccctggatactctatccacacctatctctggagaagacagtaatga

SEQ ID NO: 76 - protein, 536 aa, synthetic construct
  REGION 1..536: note = Variant of B-Glucocerebrosidase
MEFSSPSREECPKPLSRVSIMAGSLTGLLLLQAVSWASGARPCIPKSFGYSSVVCVCNATYCDSFDPPTFPALGTFSRYESTRSGRRMELSMGPIQANHTGTGLLLTLQPEQKFQKVKGFGGAMTDAAALNILALSPPAQNLLLKSYFSEEGIGYNIIRVPMASCDFSIRTYTYADTPDDFQLHNFSLPEEDTKLKIPLIHRALQLAQRPVSLFASPWTSPTWLKTNGAVNGKGSLKGQPGDIYHQTWARYFVKFLDAYAEHKLQFWAVTAENEPSAGLLSGYPFQCLGFTPEHQRDFIARDLGPTLANSTHHNVRLLILDDQRLLLPHWAKVVLTDPEAAKYVHGIAVHWYLDFLAPAKATLGETHRLFPNTMLFASEACVGSKFWEQSVRLGSWDRGMQYSHSIITNLLYHVVGWTDWNLALNPEGGPNWVRNFVDSPIIVDITKDTFYKQPMFYHLGHFSKFIPEGSQRVGLVASQKNDLDAVALMHPDGSAVVVVLNRSSKDVPLTIKDPAVGFLETISPGYSIHTYLWRRQ

SEQ ID NO: 77 - DNA, 1614 bp, synthetic construct
  misc_feature 1..1614: note = Variant of B-Glucocerebrosidase
  source 1..1614: mol_type = other DNA
atggagttttcttctcctagtagagaagaatgccccaagccactgagcagggtgagcatcatggctgcatccctcacagggctgcttcttttgcaggcagtctcatgggcctctggagccaggccctgtattcccaagtcattcggctactcctcagtggtgtgtgtatgcaatgccacctattgtgacagtttcgatcctccaactttccctgctctgggtaccttctcccggtatgagagcacaagaagtggaagacgcatggagctctcaatgggcccaatacaggctaaccacactgggacaggtctgctgctgaccctccaacctgaacagaagtttcagaaagtcaagggatttggaggagccatgactgatgcagcagcactcaacatcttggccctgtctccaccagcccagaatctgctgttgaagtcctacttctcagaggaggggattggctacaacatcatccgggttcccatggctagctgtgacttctccattaggacctatacatacgctgacacccccgatgattttcagctccataatttcagtctccctgaagaagacaccaaactgaagatacctctgattcacagagccttgcaactgtcccaaaggccagtgagcctcttcgcttctccctggactagtcctacatggctgaagactaatggtgctgttaatgggaaaggctccctgaaaggacagccaggtgacaaatatcatcagacatgggcccgctactttgtgaaattccttgatgcctatgcagagcacaagctcacattctgggcagtcaccgcagaaaacgagccctcagctgggctgctgtctggctacccctttcagtgcttgggctttactcctgagcatcaacgggacttcattgcccgggatttggggccaacactggccaacagcacccaccacaatgtaagactcctcatgctggatgaccagaggctgctgctccctcattgggccaaggtggtgttgacagacccagaagctgccaaatatgttcatggcatcgctgtccactggtacctggattttttggcccctgcaaaggctactctgggagagacccacagactcttccccaacaccatgctgtttgcatcagaagcctgcgtggggagcaaattctgggagcagtctgttaggctgggttcctgggatcggggcatgcaatattcccatagtataataactaacctcctctaccacgtggtaggatggacagactggaatctggctttgaacccagaaggaggccccaattgggtgcgcaactttgttgacagccccatcattgtggatatcacaaaggacaccttctacaaacagcctatgttctatcatctggggcactttagcaagttcattccagagggttcccagagagtaggcttggttgcctcacagaagactgatctggatgctgtggcactcatgcatcctgacgggagtgcagtggtggtagtactgaacaggtctagcaaagatgttcccttgactatcaaagacccagctgtgggctttctggaaaccatttcccctggatactctatccacacctatctctggagaagacagtaatga

SEQ ID NO: 78 - protein, 536 aa, synthetic construct
  REGION 1..536: note = Variant of B-Glucocerebrosidase
MEFSSPSREECPKPLSRVSIMAASLTGLLLLQAVSWASGARPCIPKSFGYSSVVCVCNATYCDSFDPPTFPALGTFSRYESTRSGRRMELSMGPIQANHTGTGLLLTLQPEQKFQKVKGFGGAMTDAAALNILALSPPAQNLLLKSYFSEEGIGYNIIRVPMASCDFSIRTYTYADTPDDFQLHNFSLPEEDTKLKIPLIHRALQLSQRPVSLFASPWTSPTWLKTNGAVNGKGSLKGQPGDKYHQTWARYFVKFLDAYAEHKLTFWAVTAENEPSAGLLSGYPFQCLGFTPEHQRDFIARDLGPTLANSTHHNVRLLMLDDQRLLLPHWAKVVLTDPEAAKYVHGIAVHWYLDFLAPAKATLGETHRLFPNTMLFASEACVGSKFWEQSVRLGSWDRGMQYSHSIITNLLYHVVGWTDWNLALNPEGGPNWVRNFVDSPIIVDITKDTFYKQPMFYHLGHFSKFIPEGSQRVGLVASQKTDLDAVALMHPDGSAVVVVLNRSSKDVPLTIKDPAVGFLETISPGYSIHTYLWRRQ

SEQ ID NO: 79 - DNA, 1614 bp, synthetic construct
  misc_feature 1..1614: note = Variant of B-Glucocerebrosidase
  source 1..1614: mol_type = other DNA
atggagttttcttctcctagtagagaagaatgccccaagccactgagcagggtgagcatcatggctggatccctcacagggctgcttcttttgcaggcagtctcatgggcctctggagccaggccctgtattcccaagtcattcggctactcctcagtggtgtgtgtatgcaatgccacctattgtgacagtctcgatcctccaactttccctgctctgggtaccttctcccggtatgagagcacaagaagtggaagacgcatggagctctcaatgggccctatacaggctaaccacactgggacaggtctgctgctgaccctccagcctgaacagaagtttcagaaagtcaagggatttggaggagccatgactgatgcagcagcactcaacatcttggccctgtctccaccagcccagaatctgctgttgaagtcctacttctcagaggaggggattggctacaacatcatccgggttcccatggctagctgtgacttctccattaggacctatacatacgctgacacccccgatgattttcagctccataatttcagtctccctgaagaagacaccaaactgaagatacctctgattcacagagccttgcaactggcccaaaggccagtgagcctcttcgcttctccctggactagtcctacatggctgaagactaatggtgctgttaatgggaaaggctccctgaaaggacagccaggtgacaaatatcatcagacatgggcccgctactttgtgaaattccttgatgcctatgcagagcacaagctcacattctgggcagtcaccgcagaaaacgagccctcagctgggctgctgtctggctacccctttcagtgcttgggctttactcctgagcatcaacgggacttcattgcccgggatttggggccaacactggccaacagcacccaccacaatgtaagactcctcatactggatgaccagaggctgctgctccctcattgggccaaggtggtgttgacagacccagaagctgccaaatatgttcatggcatcgctgtccactggtacctggattttttggcccctgcaaaggctactctgggagagacccacagactcttccccaacaccatgctgtttgcatcagaagcctgcgtggggagcaaattctgggagcagtctgttaggctgggttcctgggatcggggcatgcaatattcccatagtataataactaacctcctctaccacgtggtaggatggacagactggaatctggctttgaacccagaaggaggccccaattgggtgcgcaactttgttgacagccccatcattgtggatatcacaaaggacaccttctacaaacagcctatgttctatcatctggggcactttagcaagttcattccagagggttcccagagagtaggcttggttgcctcacagaagaatgatctggatgctgtggcactcatgcatcctgacgggagtgcagtggtggtagtactgaacaggtctagcaaagatgttcccttgactatcaaagacccagctgtgggctttctggaaaccatttcccctggatactctatccacacctatctctggagaagacagtaatga

SEQ ID NO: 80 - protein, 536 aa, synthetic construct
  REGION 1..536: note = Variant of B-Glucocerebrosidase
MEFSSPSREECPKPLSRVSIMAGSLTGLLLLQAVSWASGARPCIPKSFGYSSVVCVCNATYCDSLDPPTFPALGTFSRYESTRSGRRMELSMGPIQANHTGTGLLLTLQPEQKFQKVKGFGGAMTDAAALNILALSPPAQNLLLKSYFSEEGIGYNIIRVPMASCDFSIRTYTYADTPDDFQLHNFSLPEEDTKLKIPLIHRALQLAQRPVSLFASPWTSPTWLKTNGAVNGKGSLKGQPGDKYHQTWARYFVKFLDAYAEHKLTFWAVTAENEPSAGLLSGYPFQCLGFTPEHQRDFIARDLGPTLANSTHHNVRLLILDDQRLLLPHWAKVVLTDPEAAKYVHGIAVHWYLDFLAPAKATLGETHRLFPNTMLFASEACVGSKFWEQSVRLGSWDRGMQYSHSIITNLLYHVVGWTDWNLALNPEGGPNWVRNFVDSPIIVDITKDTFYKQPMFYHLGHFSKFIPEGSQRVGLVASQKNDLDAVALMHPDGSAVVVVLNRSSKDVPLTIKDPAVGFLETISPGYSIHTYLWRRQ

SEQ ID NO: 81 - DNA, 1614 bp, synthetic construct
  misc_feature 1..1614: note = Variant of B-Glucocerebrosidase
  source 1..1614: mol_type = other DNA
atggagttttcttctcctagtagagaagaatgccccaagccactgagcagggtgagcatcatggctggatccctcacagggctgcttcttttgcaggcagtctcatgggcctctggagccaggccctgtattcccaagtcattcggctactcctcagtggtgtgtgtatgcaatgccacctattgtgacagtttcgatcctccaactttccctgctctgggtaccttctcccggtatgagagcacaagaagtggaagacgcatggagctctcaatgggccctatacaggctaaccacactgggacaggtctgctgctgaccctccagcctgaacagaagtttcagaaagtcaagggatttggaggagccatgactgatgcagcagcactcaacatcttggccctgtctccaccagcccagaatctgctgttgaagtcctacttctcagaggaggggattggctacaacatcatccgggttcccatggctagctgtgacttctccattaggacctatacatacgctgacacccccgatgattttcagctccataatttcagtctccctgaagaagacaccaaactgaagatacctctgattcacagagccttgcaactggcacaaaggccagtgagcctcttcgcttctccctggactagtcctacatggctgaagactaatggtgctgttaatgggaaaggctccctgaaaggacagccaggtgacaaatatcatcagacatgggcccgctactttgtgaaattccttgatgcctatgcagagcacaagctccaattctgggcagtcaccgcagaaaacgagccctcagctgggctgctgtctggctacccctttcagtgcttgggctttactcctgagcatcaacgggacttcattgcccgggatttggggccaacactggccaacagcacccaccacaatgtaagactcctcatgctggatgaccagaggctgctgctccctcattgggccaaggtggtgttgacagacccagaagctgccaaatatgttcatggcatcgctgtccactggtacctggattttttggcccctgcaaaggctactctgggagagacccacagactcttccccaataccatgctgtttgcatcagaagcctgcgtggggagcaaattctgggagcagtctgttaggctgggttcctgggatcggggcatgcaatattcccatagtataataactaacctcctctaccacgtggtaggatggacagactggaatctggctttgaacccagaaggaggccccaattgggtgcgcaactttgttgacagccccatcattgtggatatcacaaaggacaccttctacaaacagcctatgttctatcatctggggcactttagcaagttcattccagagggttcccagagagtaggcttggttgcctcacagaagaatgatctggatgctgtggcactcatgcatcctgacgggagtgcagtggtggtagtactgaacaggtctagcaaagatgttcccttgactatcaaagacccagctgtgggctttctggaaaccatttcccctggatactctatccacacctatctctggagaagacagtaatga

SEQ ID NO: 82 - protein, 536 aa, synthetic construct
  REGION 1..536: note = Variant of B-Glucocerebrosidase
MEFSSPSREECPKPLSRVSIMAGSLTGLLLLQAVSWASGARPCIPKSFGYSSVVCVCNATYCDSFDPPTFPALGTFSRYESTRSGRRMELSMGPIQANHTGTGLLLTLQPEQKFQKVKGFGGAMTDAAALNILALSPPAQNLLLKSYFSEEGIGYNIIRVPMASCDFSIRTYTYADTPDDFQLHNFSLPEEDTKLKIPLIHRALQLAQRPVSLFASPWTSPTWLKTNGAVNGKGSLKGQPGDKYHQTWARYFVKFLDAYAEHKLQFWAVTAENEPSAGLLSGYPFQCLGFTPEHQRDFIARDLGPTLANSTHHNVRLLMLDDQRLLLPHWAKVVLTDPEAAKYVHGIAVHWYLDFLAPAKATLGETHRLFPNTMLFASEACVGSKFWEQSVRLGSWDRGMQYSHSIITNLLYHVVGWTDWNLALNPEGGPNWVRNFVDSPIIVDITKDTFYKQPMFYHLGHFSKFIPEGSQRVGLVASQKNDLDAVALMHPDGSAVVVVLNRSSKDVPLTIKDPAVGFLETISPGYSIHTYLWRRQ

SEQ ID NO: 83 - DNA, 1614 bp, synthetic construct
  misc_feature 1..1614: note = Variant of B-Glucocerebrosidase
  source 1..1614: mol_type = other DNA
atggagttttcttctcctagtagagaagaatgccccaagccactgagcagggtgagcatcatggctggatccctcacagggctgcttcttttgcaggcagtctcatgggcctctggagccaggccctgtattcccaagtcattcggctactcctcagtggtgtgtgtatgcaatgccacctattgtgacagttttgatcctccaactttccctgctctgggtaccttctcccggtatgagagcacaagaagtggaagacgcatggagctctcaatgggcccaatacaggctaaccacactgggacaggtctgctgctgaccctccaacctgaacagaagtttcagaaagtcaagggatttggaggagccatgactgatgcagcagcactcaacatcttggccctgtctccaccagcccagaatctgctgttgaagtcctacttctcagaggaggggattggctacaacatcatccgggttcccatggctagctgtgacttctccattaggacctatacatacgctgacacccccgatgattttcagctccataatttcagtctccctgaagaagacaccaaactgaagatacctctgattcacagagccttgcaactggcacaaaggccagtgagcctcttggcttctccctggactagtcctacatggctgaagactaatggtgctgttaatgggaaaggctccctgaaaggacagccaggtgacaaatatcatcagacatgggcccgctactttgtgaaattccttgatgcctatgcagagcacaagctcacattctgggcagtcaccgcagaaaacgagccctcagctgggctgctgtctggctacccctttcagtgcttgggctttactcctgagcatcaacgggacttcattgcccgggatttggggccaacactggccaacagcacccaccacaatgtaagactcctcatgctggatgaccagaggctgctgctccctcattgggccaaggtggtgttgacagacccagaagctgccaaatatgttcatggcatcgctgtccactggtacctggattttttggcccctgcaaaggctactctgggagagacccacagactcttccccaacaccatgctgtttgcatcagaagcctgcgtggggagcaaattctgggagcagtctgttaggctgggttcctgggatcggggcatgcaatattcccatagtataataactaacctcctctaccacgtggtaggatggacagactggaatctggctttgaacccagaaggaggccccaattgggtgcgcaactttgttgacagccccatcattgtggatatcacaaaggacaccttctacaaacagcctatgttctatcatctggggcactttagcaagttcattccagagggttcccagagagtaggcttggttgcctcacagaagaatgatctggatgctgtggcactcatgcatcctgacgggagtgcagtggtggtagtactgaacaggtctagcaaagatgttcccttgactatcaaagacccagctgtgggctttctggaaaccatttcccctggatactctatccacacctatctctggagaagacagtaatga

SEQ ID NO: 84 - protein, 536 aa, synthetic construct
  REGION 1..536: note = Variant of B-Glucocerebrosidase
MEFSSPSREECPKPLSRVSIMAGSLTGLLLLQAVSWASGARPCIPKSFGYSSVVCVCNATYCDSFDPPTFPALGTFSRYESTRSGRRMELSMGPIQANHTGTGLLLTLQPEQKFQKVKGFGGAMTDAAALNILALSPPAQNLLLKSYFSEEGIGYNIIRVPMASCDFSIRTYTYADTPDDFQLHNFSLPEEDTKLKIPLIHRALQLAQRPVSLLASPWTSPTWLKTNGAVNGKGSLKGQPGDKYHQTWARYFVKFLDAYAEHKLTFWAVTAENEPSAGLLSGYPFQCLGFTPEHQRDFIARDLGPTLANSTHHNVRLLMLDDQRLLLPHWAKVVLTDPEAAKYVHGIAVHWYLDFLAPAKATLGETHRLFPNTMLFASEACVGSKFWEQSVRLGSWDRGMQYSHSIITNLLYHVVGWTDWNLALNPEGGPNWVRNFVDSPIIVDITKDTFYKQPMFYHLGHFSKFIPEGSQRVGLVASQKNDLDAVALMHPDGSAVVVVLNRSSKDVPLTIKDPAVGFLETISPGYSIHTYLWRRQ

SEQ ID NO: 85 - DNA, 1614 bp, synthetic construct
  misc_feature 1..1614: note = Variant of B-Glucocerebrosidase
  source 1..1614: mol_type = other DNA
atggagttttcttctcctagtagagaagaatgccccaagccactgagcagggtgagcatcatggctggatccctcacagggctgcttcttttgcaggcagtctcatgggcctctggagccaggccctgtattcccaagtcattcggctactcctcagtggtgtgtgtatgcaatgccacctattgtgacagttttgatcctccaactttccctgctctgggtaccttctcccggtatgagagcacaagaagtggaagacgcatggagctctcaatgggcccaatacaggctaaccacactgggacaggtctgctgctgaccctccaacctgaacagaagtttcagaaagtcaagggatttggaggagccatgactgatgcagcagcactcaacatcttggccctgtctccaccagcccagaatctgctgttgaagtcctacttctcagaggaggggattggctacaacatcatccgggttcccatggctagctgtgacttctccattaggacctatacatacgctgacacccccgatgattttcagctccataatttcagtctccctgaagaagacaccaaactgaagatacctctgattcacagagccttgcaactggcacaaaggccagtgagcctcttggcttctccctggactagtcctacatggctgaagactaatggtgctgttaatgggaaaggctccctgaaaggacagccaggtgacatatatcatcagacatgggcccgctactttgtgaaattccttgatgcctatgcagagcacaagctcacattctgggcagtcaccgcagaaaacgagccctcagctgggctgctgtctggctacccctttcagtgcttgggctttactcctgagcatcaacgggacttcattgcccgggatttggggccaacactggccaacagcacccaccacaatgtaagactcctcatgctggatgaccagaggctgctgctccctcattgggccaaggtggtgttgacagacccagaagctgccaaatatgttcatggcatcgctgtccactggtacctggattttttggcccctgcaaaggctactctgggagagacccacagactcttccccaataccatgctgtttgcatcagaagcctgcgtggggagcaaattctgggagcagtctgttaggctgggttcctgggatcggggcatgcaatattcccatagtataataactaacctcctctaccacgtggtaggatggacagactggaatctggctttgaacccagaaggaggccccaattgggtgcgcaactttgttgacagccccatcattgtggatatcacaaaggacaccttctacaaacagcctatgttctatcatctggggcactttagcaagttcattccagagggttcccagagagtaggcttggttgcctcacagaagaatgatctggatgctgtggcactcctgcatcctgacgggagtgcagtggtggtagtactgaacaggtctagcaaagatgttcccttgactatcaaagacccagctgtgggctttctggaaaccatttcccctggatactctatccacacctatctctggagaagacagtaatga

SEQ ID NO: 86 - protein, 536 aa, synthetic construct
  REGION 1..536: note = Variant of B-Glucocerebrosidase
MEFSSPSREECPKPLSRVSIMAGSLTGLLLLQAVSWASGARPCIPKSFGYSSVVCVCNATYCDSFDPPTFPALGTFSRYESTRSGRRMELSMGPIQANHTGTGLLLTLQPEQKFQKVKGFGGAMTDAAALNILALSPPAQNLLLKSYFSEEGIGYNIIRVPMASCDFSIRTYTYADTPDDFQLHNFSLPEEDTKLKIPLIHRALQLAQRPVSLLASPWTSPTWLKTNGAVNGKGSLKGQPGDIYHQTWARYFVKFLDAYAEHKLTFWAVTAENEPSAGLLSGYPFQCLGFTPEHQRDFIARDLGPTLANSTHHNVRLLMLDDQRLLLPHWAKVVLTDPEAAKYVHGIAVHWYLDFLAPAKATLGETHRLFPNTMLFASEACVGSKFWEQSVRLGSWDRGMQYSHSIITNLLYHVVGWTDWNLALNPEGGPNWVRNFVDSPIIVDITKDTFYKQPMFYHLGHFSKFIPEGSQRVGLVASQKNDLDAVALLHPDGSAVVVVLNRSSKDVPLTIKDPAVGFLETISPGYSIHTYLWRRQ

SEQ ID NO: 87 - DNA, 1614 bp, synthetic construct
  misc_feature 1..1614: note = Variant of B-Glucocerebrosidase
  source 1..1614: mol_type = other DNA
atggagttttcttctcctagtagagaagaatgccccaagccactgagcagggtgagcatcatggctggatccctcacagggctgcttcttttgcaggcagtctcatgggcctctggagccaggccctgtattcccaagtcattcggctactcctcagtggtgtgtgtatgcaatgccacctattgtgacagtttcgatcctccaactttccctgctctgggtaccttctcccggtatgagagcacaagaagtggaagacgcatggagctctcaatgggccctatacaggctaaccacactgggacaggtctgctgctgaccctccaacctgaacagaagtttcagaaagtcaagggatttggaggagccatgactgatgcagcagcactcaacatcttggccctgtctccaccagcccagaatctgctgttgaagtcctacttctcagaggaggggattggctacaacatcatccgggttcccatggctagctgtgacttctccattaggacctatacatacgctgacacccccgatgattttcagctccataatttcagtctccctgaagaagacaccaaactgaagatacctctgattcacagagccttgcaactggcccaaaggccagtgagcctcttcgcttctccctggactagtcctacatggctgaagactaatggtgctgttaatgggaaaggctccctgaaaggacagccaggtgacaaatatcatcagacatgggcccgctactttgtgaaattccttgatgcctatgcagagcacaagctcacattctgggcagtcaccgcagaaaacgagccctcagctgggctgctgtctggctacccctttcagtgcttgggctttactcctgagcatcaacgggacttcattgcccgggatttggggccaacactggccaacagcacccaccacaatgtaagactcctcatgctggatgaccagaggctgctgctccctcattgggccaaggtggtgttgacagacccagaagctgccaaatatgttcatggcatcgctgtccactggtacctggattttttggcccctgcaaaggctactctgggagagacccacagactcttccccaataccatgctgtttgcatcagaagcctgcgtggggagcaaattctgggagcagtctgttaggctgggttcctgggatcggggcatgcaatattcccatagtataataactaacctcctctaccacgtggtaggatggacagactggaatctggctttgaacccagaaggaggccccaattgggtgcgcaactttgttgacagccccatcattgtggatatcacaaaggacaccttctacaaacagcctatgttctatcatctggggcactttagcaagttcattccagagggttcccagagagtaggcttggttgcctcacagaagaatgatctggatgctgtggcactcatgcatcctgacgggagtgcagtggtggtagtactgaacaggtctagcaaagatgttcccttgactatcaaagacccagctgtgggctttctggaaaccatttcccctggatactctatccacacctatctctggagaagacagtaatga

SEQ ID NO: 88 - protein, 536 aa, synthetic construct
  REGION 1..536: note = Variant of B-Glucocerebrosidase
MEFSSPSREECPKPLSRVSIMAGSLTGLLLLQAVSWASGARPCIPKSFGYSSVVCVCNATYCDSFDPPTFPALGTFSRYESTRSGRRMELSMGPIQANHTGTGLLLTLQPEQKFQKVKGFGGAMTDAAALNILALSPPAQNLLLKSYFSEEGIGYNIIRVPMASCDFSIRTYTYADTPDDFQLHNFSLPEEDTKLKIPLIHRALQLAQRPVSLFASPWTSPTWLKTNGAVNGKGSLKGQPGDKYHQTWARYFVKFLDAYAEHKLTFWAVTAENEPSAGLLSGYPFQCLGFTPEHQRDFIARDLGPTLANSTHHNVRLLMLDDQRLLLPHWAKVVLTDPEAAKYVHGIAVHWYLDFLAPAKATLGETHRLFPNTMLFASEACVGSKFWEQSVRLGSWDRGMQYSHSIITNLLYHVVGWTDWNLALNPEGGPNWVRNFVDSPIIVDITKDTFYKQPMFYHLGHFSKFIPEGSQRVGLVASQKNDLDAVALMHPDGSAVVVVLNRSSKDVPLTIKDPAVGFLETISPGYSIHTYLWRRQ

SEQ ID NO: 89 - DNA, 1614 bp, synthetic construct
  misc_feature 1..1614: note = Variant of B-Glucocerebrosidase
  source 1..1614: mol_type = other DNA
atggagttttcttctcctagtagagaagaatgccccaagccactgagcagggtgagcatcatggctggctccctcacagggctgcttcttttgcaggcagtctcatgggcctctggagccaggccctgtattcccaagtcattcggctactcctcagtggtgtgtgtatgcaatgccacctattgtgacagttttgatcctccaactttccctgctctgggtaccttctcccggtatgagagcacaagaagtggaagacgcatggagctctcaatgggcccaatacaggctaaccacactgggacaggtctgctgctgaccctccaacctgaacagaagtttcagaaagtcaagggatttggaggagccatgactgatgcagcagcactcaacatcttggccctgtctccaccagcccagaatctgctgttgaagtcctacttctcagaggaggggattggctacaacatcatccgggttcccatggctagctgtgacttctccattaggacctatacatacgctgacacccccgatgattttcagctccataatttcagtctccctgaagaagacaccaaactgaagatacctctgattcacagagccttgcaactgtcccaaaggccagtgagcctcctcgcttctccctggactagtcctacatggctgaagactaatggtgctgttaatgggaaaggctccctgaaaggacagccaggtgacaaatatcatcagacatgggcccgctactttgtgaaattccttgatgcctatgcagagcacaagctccaattctgggcagtcaccgcagaaaacgagccctcagctgggctgctgtctggctacccctttcagtgcttgggctttactcctgagcatcaacgggacttcattgcccgggatttggggccaacactggccaacagcacccaccacaatgtaagactcctcatgctggatgaccagaggctgctgctccctcattgggccaaggtggtgttgacagacccagaagctgccaaatatgttcatggcatcgctgtccactggtacctggattttttggcccctgcaaaggctactctgggagagacccacagactcttccccgataccatgctgtttgcatcagaagcctgcgtggggagcaaattctgggagcagtctgttaggctgggttcctgggatcggggcatgcaatattcccatagtataataactaacctcctctaccacgtggtaggatggacagactggaatctggctttgaacccagaaggaggccccaattgggtgcgcaactttgttgacagccccatcattgtggatatcacaaaggacaccttctacaaacagcctatgttctatcatctggggcactttagcaagttcattccagagggttcccagagagtaggcttggttgcctcacagaagaatgatctggatgctgtggcactcatgcatcctgacgggagtgcagtggtggtagtactgaacaggtctagcaaagatgttcccttgactatcaaagacccagctgtgggctttctggaaaccatttcccctggatactctatccacacctatctctggagaagacagtaatga

SEQ ID NO: 90 - protein, 536 aa, synthetic construct
  REGION 1..536: note = Variant of B-Glucocerebrosidase
MEFSSPSREECPKPLSRVSIMAGSLTGLLLLQAVSWASGARPCIPKSFGYSSVVCVCNATYCDSFDPPTFPALGTFSRYESTRSGRRMELSMGPIQANHTGTGLLLTLQPEQKFQKVKGFGGAMTDAAALNILALSPPAQNLLLKSYFSEEGIGYNIIRVPMASCDFSIRTYTYADTPDDFQLHNFSLPEEDTKLKIPLIHRALQLSQRPVSLLASPWTSPTWLKTNGAVNGKGSLKGQPGDKYHQTWARYFVKFLDAYAEHKLQFWAVTAENEPSAGLLSGYPFQCLGFTPEHQRDFIARDLGPTLANSTHHNVRLLMLDDQRLLLPHWAKVVLTDPEAAKYVHGIAVHWYLDFLAPAKATLGETHRLFPDTMLFASEACVGSKFWEQSVRLGSWDRGMQYSHSIITNLLYHVVGWTDWNLALNPEGGPNWVRNFVDSPIIVDITKDTFYKQPMFYHLGHFSKFIPEGSQRVGLVASQKNDLDAVALMHPDGSAVVVVLNRSSKDVPLTIKDPAVGFLETISPGYSIHTYLWRRQ

SEQ ID NO: 91 - DNA, 1614 bp, synthetic construct
  misc_feature 1..1614: note = Variant of B-Glucocerebrosidase
  source 1..1614: mol_type = other DNA
atggagttttcttctcctagtagagaagaatgccccaagccactgagcagggtgagcatcatggctggatccctcacagggctgcttcttttgcaggcagtctcatgggcctctggagccaggccctgtattcccaagtcattcggctactcctcagtggtgtgtgtatgcaatgccacctattgtgacagttttgatcctccaactttccctgctctgggtaccttctcccggtatgagagcacaagaagtggaagacgcatggagctctcaatgggccctatacaggctaaccacactgggacaggtctgctgctgaccctccaacctgaacagaagtttcagaaagtcaagggatttggaggagccatgactgatgcagcagcactcaacatcttggccctgtctccaccagcccagaatctgctgttgaagtcctacttctcagaggaggggattggctacaacatcatccgggttcccatggctagctgtgacttctccattaggacctatacatacgctgacacccccgatgattttcagctccataatttcagtctccctgaagaagacaccaaaatgaagatacctctgattcacagagccttgcaactggcacaaaggccagtgagcctcttggcttctccctggactagtcctacatggctgaagactaatggtgctgttaatgggaaaggctccctgaaaggacagccaggtgacaaatatcatcagacatgggcccgctactttgtgaaattccttgatgcctatgcagagcacaagctccaattctgggcagtcaccgcagaaaacgagccctcagctgggctgctgtctggctacccctttcagtgcttgggctttactcctgagcatcaacgggacttcattgcccgggatttggggccaacactggccaacagcacccaccacaatgtaagactcctcatgctggatgaccagaggctgctgctccctcattgggccaaggtggtgttgacagacccagaagctgccaaatatgttcatggcatcgctgtccactggtacctggattttttggcccctgcaaaggctactctgggagagacccacagactcttccccaacaccatgctgtttgcatcagaagcctgcgtggggagcaaattctgggagcagtctgttaggctgggttcctgggatcggggcatgcaatattcccatagtataataactaacctcctctaccacgtggtaggatggacagactggaatctggctttgaacccagaaggaggccccaattgggtgcgcaactttgttgacagccccatcattgtggatatcacaaaggacaccttctacaaacagcctatgttctatcatctggggcactttagcaagttcattccagagggttcccagagagtaggcttggttgcctcacagaagaatgatctggatgctgtggcactcatgcatcctgacgggagtgcagtggtggtagtactgaacaggtctagcaaagatgttcccttgactatcaaagacccagctgtgggctttctggaaaccatttcccctggatactctatccacacctatctctggagaagacagtaatga

SEQ ID NO: 92 - protein, 536 aa, synthetic construct
  REGION 1..536: note = Variant of B-Glucocerebrosidase
MEFSSPSREECPKPLSRVSIMAGSLTGLLLLQAVSWASGARPCIPKSFGYSSVVCVCNATYCDSFDPPTFPALGTFSRYESTRSGRRMELSMGPIQANHTGTGLLLTLQPEQKFQKVKGFGGAMTDAAALNILALSPPAQNLLLKSYFSEEGIGYNIIRVPMASCDFSIRTYTYADTPDDFQLHNFSLPEEDTKMKIPLIHRALQLAQRPVSLLASPWTSPTWLKTNGAVNGKGSLKGQPGDKYHQTWARYFVKFLDAYAEHKLQFWAVTAENEPSAGLLSGYPFQCLGFTPEHQRDFIARDLGPTLANSTHHNVRLLMLDDQRLLLPHWAKVVLTDPEAAKYVHGIAVHWYLDFLAPAKATLGETHRLFPNTMLFASEACVGSKFWEQSVRLGSWDRGMQYSHSIITNLLYHVVGWTDWNLALNPEGGPNWVRNFVDSPIIVDITKDTFYKQPMFYHLGHFSKFIPEGSQRVGLVASQKNDLDAVALMHPDGSAVVVVLNRSSKDVPLTIKDPAVGFLETISPGYSIHTYLWRRQ

SEQ ID NO: 93 - DNA, 1614 bp, synthetic construct
  misc_feature 1..1614: note = Variant of B-Glucocerebrosidase
  source 1..1614: mol_type = other DNA
atggagttttcttctcctagtagagaagaatgccccaagccactgagcagggtgagcatcatggctggatccctcacagggctgcttcttttgcaggcagtctcatgggcctctggagccaggccctgtattcccaagtcattcggctactcctcagtggtgtgtgtatgcaatgccacctattgtgacagtctcgatcctccaactttccctgctctgggtaccttctcccggtatgagagcacaagaagtggaagacgcatggagctctcaatgggcccaatacaggctaaccacactgggacaggtctgctgctgaccctccaacctgaacagaagtttcagaaagtcaagggatttggaggagccatgactgatgcagcagcactcaacatcttggccctgtctccaccagcccagaatctgctgttgaagtcctacttctcagaggaggggattggctacaacatcatccgggttcccatggctagctgtgacttctccattaggacctatacatacgctgacacccccgatgattttcagctccataatttcagtctccctgaagaagacaccaaactgaagatacctctgattcacagagccttgcaactggcacaaaggccagtgagcctcttggcttctccctggactagtcctacatggctgaagactaatggtgctgttaatgggaaaggctccctgaaaggacagccaggtgacatatatcatcagacatgggcccgctactttgtgaaattccttgatgcctatgcagagcacaagctccagttctgggcagtcaccgcagaaaacgagccctcagctgggctgctgtctggctacccctttcagtgcttgggctttactcctgagcatcaacgggacttcattgcccgggatttggggccaacactggccaacagcacccaccacaatgtaagactcctcatgctggatgaccagaggctgctgctccctcattgggccaaggtggtgttgacagacccagaagctgccaaatatgttcatggcatcgctgtccactggtacctggattttttggcccctgcaaaggctactctgggagagacccacagactcttccccaacaccatgctgtttgcatcagaagcctgcgtggggagcaaattctgggagcagtctgttaggctgggttcctgggatcggggcatgcaatattcccatagtataataactaacctcctctaccacgtggtaggatggacagactggaatctggctttgaacccagaaggaggccccaattgggtgcgcaactttgttgacagccccatcattgtggatatcacaaaggacaccttctacaaacagcctatgttctatcatctggggcactttagcaagttcattccagagggttcccagagagtaggcttggttgcctcacagaagactgatctggatgctgtggcactcatgcatcctgacgggagtgcagtggtggtagtactgaacaggtctagcaaagatgttcccttgactatcaaagacccagctgtgggctttctggaaaccatttcccctggatactctatccacacctatctctggagaagacagtaatga

SEQ ID NO: 94 - protein, 536 aa, synthetic construct
  REGION 1..536: note = Variant of B-Glucocerebrosidase
MEFSSPSREECPKPLSRVSIMAGSLTGLLLLQAVSWASGARPCIPKSFGYSSVVCVCNATYCDSLDPPTFPALGTFSRYESTRSGRRMELSMGPIQANHTGTGLLLTLQPEQKFQKVKGFGGAMTDAAALNILALSPPAQNLLLKSYFSEEGIGYNIIRVPMASCDFSIRTYTYADTPDDFQLHNFSLPEEDTKLKIPLIHRALQLAQRPVSLLASPWTSPTWLKTNGAVNGKGSLKGQPGDIYHQTWARYFVKFLDAYAEHKLQFWAVTAENEPSAGLLSGYPFQCLGFTPEHQRDFIARDLGPTLANSTHHNVRLLMLDDQRLLLPHWAKVVLTDPEAAKYVHGIAVHWYLDFLAPAKATLGETHRLFPNTMLFASEACVGSKFWEQSVRLGSWDRGMQYSHSIITNLLYHVVGWTDWNLALNPEGGPNWVRNFVDSPIIVDITKDTFYKQPMFYHLGHFSKFIPEGSQRVGLVASQKTDLDAVALMHPDGSAVVVVLNRSSKDVPLTIKDPAVGFLETISPGYSIHTYLWRRQ

SEQ ID NO: 95 - DNA, 1614 bp, synthetic construct
  misc_feature 1..1614: note = Variant of B-Glucocerebrosidase
  source 1..1614: mol_type = other DNA
atggagttttcttctcctagtagagaagaatgccccaagccactgagcagggtgagcatcatggctggctccctcacagggctgcttcttttgcaggcagtctcatgggcctctggagccaggccctgtattcccaagtcattcggctactcctcagtggtgtgtgtatgcaatgccacctattgtgacagttttgatcctccaactttccctgctctgggtaccttctcccggtatgagagcacaagaagtggaagacgcatggagctctcaatgggcccaatacaggctaaccacactgggacaggtctgctgctgaccctccaacctgaacagaagtttcagaaagtcaagggatttggaggagccatgactgatgcagcagcactcaacatcttggccctgtctccaccagcccagaatctgctgttgaagtcctacttctcagaggaggggattggctacaacatcatccgggttcccatggctagctgtgacttctccattaggacctatacatacgctgacacccccgatgattttcagctccataatttcagtctccctgaagaagacaccaaactgaagatacctctgattcacagagccttgcaactgtcccaaaggccagtgagcctcttcgcttctccctggactagtcctacatggctgaagactaatggtgctgttaatgggaaaggctccctgaaaggacagccaggtgacaaatatcatcagacatgggcccgctactttgtgaaattccttgatgcctatgcagagcacaagctccaattctgggcagtcaccgcagaaaacgagccctcagctgggctgctgtctggctacccctttcagtgcttgggctttactcctgagcatcaacgggacttcattgcccgggatttggggccaacactggccaacagcacccaccacaatgtaagactcctcatactggatgaccagaggctgctgctccctcattgggccaaggtggtgttgacagacccagaagctgccaaatatgttcatggcatcgctgtccactggtacctggattttttggcccctgcaaaggctactctgggagagacccacagactcttccccaataccatgctgtttgcatcagaagcctgcgtggggagcaaattctgggagcagtctgttaggctgggttcctgggatcggggcatgcaatattcccatagtataataactaacctcctctaccacgtggtaggatggacagactggaatctggctttgaacccagaaggaggccccaattgggtgcgcaactttgttgacagccccatcattgtggatatcacaaaggacaccttctacaaacagcctatgttctatcatctggggcactttagcaagttcattccagagggttcccagagagtaggcttggttgcctcacagaagaatgatctggatgctgtggcactcatgcatcctgacgggagtgcagtggtggtagtactgaacaggtctagcaaagatgttcccttgactatcaaagacccagctgtgggctttctggaaaccatttcccctggatactctatccacacctatctctggagaagacagtaatga

SEQ ID NO: 96 - protein, 536 aa, synthetic construct
  REGION 1..536: note = Variant of B-Glucocerebrosidase
MEFSSPSREECPKPLSRVSIMAGSLTGLLLLQAVSWASGARPCIPKSFGYSSVVCVCNATYCDSFDPPTFPALGTFSRYESTRSGRRMELSMGPIQANHTGTGLLLTLQPEQKFQKVKGFGGAMTDAAALNILALSPPAQNLLLKSYFSEEGIGYNIIRVPMASCDFSIRTYTYADTPDDFQLHNFSLPEEDTKLKIPLIHRALQLSQRPVSLFASPWTSPTWLKTNGAVNGKGSLKGQPGDKYHQTWARYFVKFLDAYAEHKLQFWAVTAENEPSAGLLSGYPFQCLGFTPEHQRDFIARDLGPTLANSTHHNVRLLILDDQRLLLPHWAKVVLTDPEAAKYVHGIAVHWYLDFLAPAKATLGETHRLFPNTMLFASEACVGSKFWEQSVRLGSWDRGMQYSHSIITNLLYHVVGWTDWNLALNPEGGPNWVRNFVDSPIIVDITKDTFYKQPMFYHLGHFSKFIPEGSQRVGLVASQKNDLDAVALMHPDGSAVVVVLNRSSKDVPLTIKDPAVGFLETISPGYSIHTYLWRRQ

SEQ ID NO: 97 - DNA, 1614 bp, synthetic construct
  misc_feature 1..1614: note = Variant of B-Glucocerebrosidase
  source 1..1614: mol_type = other DNA
atggagttttcttctcctagtagagaagaatgccccaagccactgagcagggtgagcatcatggctggatccctcacagggctgcttcttttgcaggcagtctcatgggcctctggagccaggccctgtattcccaagtcattcggctactcctcagtggtgtgtgtatgcaatgccacctattgtgacagtttcgatcctccaactctccctgctctgggtaccttctcccggtatgagagcacaagaagtggaagacgcatggagctctcaatgggcccaatacaggctaaccacactgggacaggtctgctgctgaccctccagcctgaacagaagtttcagaaagtcaagggatttggaggagccatgactgatgcagcagcactcaacatcttggccctgtctccaccagcccaggatctgctgttgaagtcctacttctcagaggaggggattggctacaacatcatccgggttcccatggctagctgtgacttctccattaggacctatacatacgctgacacccccgatgattttcagctccataatttcagtctccctgaagaagacaccaaaatgaagatacctctgattcacagagccttgcaactggcacaaaggccagtgagcctcttggcttctccctggactagtcctacatggctgaagactaatggtgctgttaatgggaaaggctccctgaaaggacagccaggtgacatatatcatcagacatgggcccgctactttgtgaaattccttgatgcctatgcagagcacaagctcacattctgggcagtcaccgcagaaaacgagccctcagctgggctgctgtctggctacccctttcagtgcttgggctttactcctgagcatcaacgggacttcattgcccgggatttggggccaacactggccaacagcacccaccacaatgtaagactcctcatgctggatgaccagaggctgctgctccctcattgggccaaggtggtgttgacagacccagaagctgccaaatatgttcatggcatcgctgtccactggtacctggattttttggcccctgcaaaggctactctgggagagacccacagactcttccccaataccatgctgtttgcatcagaagcctgcgtggggagcaaattctgggagcagtctgttaggctgggttcctgggatcggggcatgcaatattcccatagtataataactaacctcctctaccacgtggtaggatggacagactggaatctggctttgaacccagaaggaggccccaattgggtgcgcaactttgttgacagccccatcattgtggatatcacaaaggacaccttctacaaacagcctatgttctatcatctggggcactttagcaagttcattccagagggttcccagagagtaggcttggttgcctcacagaagaatgatctggatgctgtggcactcatgcatcctgacgggagtgcagtggtggtagtactgaacaggtctagcaaagatgttcccttgactatcaaagacccagctgtgggctttctggaaaccatttcccctggatactctatccacacctatctctggagaagacagtaatga

SEQ ID NO: 98 - protein, 536 aa, synthetic construct
  REGION 1..536: note = Variant of B-Glucocerebrosidase
MEFSSPSREECPKPLSRVSIMAGSLTGLLLLQAVSWASGARPCIPKSFGYSSVVCVCNATYCDSFDPPTLPALGTFSRYESTRSGRRMELSMGPIQANHTGTGLLLTLQPEQKFQKVKGFGGAMTDAAALNILALSPPAQDLLLKSYFSEEGIGYNIIRVPMASCDFSIRTYTYADTPDDFQLHNFSLPEEDTKMKIPLIHRALQLAQRPVSLLASPWTSPTWLKTNGAVNGKGSLKGQPGDIYHQTWARYFVKFLDAYAEHKLTFWAVTAENEPSAGLLSGYPFQCLGFTPEHQRDFIARDLGPTLANSTHHNVRLLMLDDQRLLLPHWAKVVLTDPEAAKYVHGIAVHWYLDFLAPAKATLGETHRLFPNTMLFASEACVGSKFWEQSVRLGSWDRGMQYSHSIITNLLYHVVGWTDWNLALNPEGGPNWVRNFVDSPIIVDITKDTFYKQPMFYHLGHFSKFIPEGSQRVGLVASQKNDLDAVALMHPDGSAVVVVLNRSSKDVPLTIKDPAVGFLETISPGYSIHTYLWRRQ

SEQ ID NO: 99 - DNA, 1614 bp, synthetic construct
  misc_feature 1..1614: note = Variant of B-Glucocerebrosidase
  source 1..1614: mol_type = other DNA
atggagttttcttctcctagtagagaagaatgccccaagccactgagcagggtgagcatcatggctgcatccctcacagggctgcttcttttgcaggcagtctcatgggcctctggagccaggccctgtattcccaagtcattcggctactcctcagtggtgtgtgtatgcaatgccacctattgtgacagttttgatcctccaactttccctgctctgggtaccttctcccggtatgagagcacaagaagtggaagacgcatggagctctcaatgggccctatacaggctaaccacactgggacaggtctgctgctgaccctccaacctgaacagaagtttcagaaagtcaagggatttggaggagccatgactgatgcagcagcactcaacatcttggccctgtctccaccagcccagaatctgctgttgaagtcctacttctcagaggaggggattggctacaacatcatccgggttcccatggctagctgtgacttctccattaggacctatacatacgctgacacccccgatgattttcagctccataatttcagtctccctgaagaagacaccaaactgaagatacctctgattcacagagccttgcaactggcacaaaggccagtgagcctcttggcttctccctggactagtcctacatggctgaagactaatggtgctgttaatgggaaaggctccctgaaaggacagccaggtgacatctatcatcagacatgggcccgctactttgtgaaattccttgatgcctatgcagagcacaagctcacattctgggcagtcaccgcagaaaacgagccctcagctgggctgctgtctggctacccctttcagtgcttgggctttactcctgagcatcaacgggacttcattgcccgggatttggggccaacactggccaacagcacccaccacaatgtaagactcctcatgctggatgaccagaggctgctgctccctcattgggccaaggtggtgttgacagacccagaagctgccaaatatgttcatggcatcgctgtccactggtacctggattttttggcccctgcaaaggctactctgggagagacccacagactcttccccgataccatgctgtttgcatcagaagcctgcgtggggagcaaattctgggagcagtctgttaggctgggttcctgggatcggggcatgcaatattcccatagtataataactaacctcctctaccacgtggtaggatggacagactggaatctggctttgaacccagaaggaggccccaattgggtgcgcaactttgttgacagccccatcattgtggatatcacaaaggacaccttctacaaacagcctatgttctatcatctggggcactttagcaagttcattccagagggttcccagagagtaggcttggttgcctcacagaagaatgatctggatgctgtggcactcatgcatcctgacgggagtgcagtggtggtagtactgaacaggtctagcaaagatgttcccttgactatcaaagacccagctgtgggctttctggaaaccatttcccctggatactctatccacacctatctctggagaagacagtaatga

SEQ ID NO: 100 - protein, 536 aa, synthetic construct
  REGION 1..536: note = Variant of B-Glucocerebrosidase
MEFSSPSREECPKPLSRVSIMAASLTGLLLLQAVSWASGARPCIPKSFGYSSVVCVCNATYCDSFDPPTFPALGTFSRYESTRSGRRMELSMGPIQANHTGTGLLLTLQPEQKFQKVKGFGGAMTDAAALNILALSPPAQNLLLKSYFSEEGIGYNIIRVPMASCDFSIRTYTYADTPDDFQLHNFSLPEEDTKLKIPLIHRALQLAQRPVSLLASPWTSPTWLKTNGAVNGKGSLKGQPGDIYHQTWARYFVKFLDAYAEHKLTFWAVTAENEPSAGLLSGYPFQCLGFTPEHQRDFIARDLGPTLANSTHHNVRLLMLDDQRLLLPHWAKVVLTDPEAAKYVHGIAVHWYLDFLAPAKATLGETHRLFPDTMLFASEACVGSKFWEQSVRLGSWDRGMQYSHSIITNLLYHVVGWTDWNLALNPEGGPNWVRNFVDSPIIVDITKDTFYKQPMFYHLGHFSKFIPEGSQRVGLVASQKNDLDAVALMHPDGSAVVVVLNRSSKDVPLTIKDPAVGFLETISPGYSIHTYLWRRQ

SEQ ID NO: 101 - DNA, 1614 bp, synthetic construct
  misc_feature 1..1614: note = Variant of B-Glucocerebrosidase
  source 1..1614: mol_type = other DNA
atggagttttcttctcctagtagagaagaatgccccaagccactgagcagggtgagcatcatggctggctccctcacagggctgcttcttttgcaggcagtctcatgggcctctggagccaggccctgtattcccaggtcattcggctactcctcagtggtgtgtgtatgcaatgccacctattgtgacagttttgatcctcccactttccctgctctgggtaccttctcccggtatgagagcacaagaagtggaagacgcatggagctctcaatgggcccaatacaggctaaccgcactgggacaggtctgctgctgaccctccaacctgaacagaagtttcagaaagtcaagggatttggaggagccatgactgatgcagcagcactcaacatcttgtccctgtctccaccagcccagaatctgctgttgaagtcctacttctcagaggaggggattggctacaacatcatccgggttcccatggctagctgtgacttctccattaggacctatacatacgctgacacccccgatgattttcagctccataatttcagtctccctgaagaagacaccaaactgaagatacctctgattcacagagccttgcagctggcacaaaggccagtgagcctcttggcttctccctggactagtcctacatggctgaagactaatggtgctctgaatgggaaaggctccctgaaaggacagccaggtgacatctatcatcagacatgggcccgctactttgtgaaattccttgatgcctatgcagagcacaagctccagttctgggcagtcaccgcagaaaacgagccctcagctgggctgctgtctggctacccctttcagtgcttgggctttactcctgagcatcaacgggacttcattgcccgggatttggggccaacactggccaacagcacccaccacaatgtaagactcctcatgctggatgaccagaggctgctgctccctcattgggccaaggtggtgttgacagacccagaagctgccaaatatgttcatggcatcgctgtccactggtacctggattttttggcccctgcaaaggctactctgggagagacccacagactcttccccaactatatgctgtttgcatcagaagcctgcgtggggagcaaattctgggagcagtctgttaggctgggttcctgggatcggggcatgcaatattcccatagtataataactaacctcctctaccacgtggtaggatggacagactggaatctggctttgaacccagaaggaggccccaattgggtgcgcaactttgttgacagccccatcattgtggatatcacaaaggacgtgttctacaaacagcctatgttctatcatctggggcactttagcaagttcattccagagggttcccagagagtaggcttggttgcctcacagaagaatgatctggatgctgtggcactcatgcatcctgacgggagtgcagtggtggtagtactgaacaggtctagcaaagatgttcccttgactatcaaagacccagctgtgggctttctggaaaccatttcccctggatactctatccacacctatctctggagaagacagtaatga

SEQ ID NO: 102 - protein, 536 aa, synthetic construct
  REGION 1..536: note = Variant of B-Glucocerebrosidase
MEFSSPSREECPKPLSRVSIMAGSLTGLLLLQAVSWASGARPCIPRSFGYSSVVCVCNATYCDSFDPPTFPALGTFSRYESTRSGRRMELSMGPIQANRTGTGLLLTLQPEQKFQKVKGFGGAMTDAAALNILSLSPPAQNLLLKSYFSEEGIGYNIIRVPMASCDFSIRTYTYADTPDDFQLHNFSLPEEDTKLKIPLIHRALQLAQRPVSLLASPWTSPTWLKTNGALNGKGSLKGQPGDIYHQTWARYFVKFLDAYAEHKLQFWAVTAENEPSAGLLSGYPFQCLGFTPEHQRDFIARDLGPTLANSTHHNVRLLMLDDQRLLLPHWAKVVLTDPEAAKYVHGIAVHWYLDFLAPAKATLGETHRLFPNYMLFASEACVGSKFWEQSVRLGSWDRGMQYSHSIITNLLYHVVGWTDWNLALNPEGGPNWVRNFVDSPIIVDITKDVFYKQPMFYHLGHFSKFIPEGSQRVGLVASQKNDLDAVALMHPDGSAVVVVLNRSSKDVPLTIKDPAVGFLETISPGYSIHTYLWRRQ

SEQ ID NO: 103 - DNA, 1614 bp, synthetic construct
  misc_feature 1..1614: note = Variant of B-Glucocerebrosidase
  source 1..1614: mol_type = other DNA
atggagttttcttctcctagtagagaagaatgccccaagccactgagcagggtgagcatcatggctggctccctcacagggctgcttcttttgcaggcagtctcatgggcctctggagccaggccctgtattcccaagtcattcggctactcctcagtggtgtgtgtatgcaatgccacctattgtgacagttttgatcctctcactttccctgctctgggtaccttctcccggtatgagagcacaagaagtggaagacgcatggagctctcaatgggcccaatacaggctaaccacactgggacaggtctgctgctgaccctccaacctgaacagaagtttcagaaagtcaagggatttggaggagccatgactgatgcagcagcactcaacatcttggccctgtctccaccagcccagaatctgctgttgaagtcctacttctcagaggaggggattggctacaacatcatccgggttcccatggctagctgtgacttctccattaggacctatacatacgctgacacccccgatgattttcagctccataatttcagtctccctgaagaagacaccaaactgaagatacctctgattcacagagccttgcagctggcacaaaggccactgagcctcttggcttctccctggactagtcctacatggctgaagactaatggtgctctgaatgggaaaggctccctgaaaggacagccaggtgacatctatcatcagacatgggcccgctactttgtgaaattccttgatgcctatgcagagcacaagctccagttctgggcagtcaccgcagaaaacgagccctcagctgggctgctgtctggctacccctttcagtgcttgggctttactcctgagcatcaacgggacttcattgcccgggatttggggccaacactggccaacagcacccaccacaatgtaagactcctcatgctggatgaccagaggctgctgctccctcattgggccaaggtggtgttgacagacccagaagctgccaaatatgttcatggcatcgctgtccactggtacctggattttttggcccctgcaaaggctactctgggagagacccacagactcttccccaacaccatgctgtttgcatcagaagcctgcgtggggagcaaattctgggagcagtctgttaggctgggttcctgggatcggggcatgcaatattcccatagtataataactaacctcctctaccacgtggtaggatggacagactggaatctggctttgaacccagaaggaggccccaattgggtgcgcaactttgttgacagccccatcattgtggatatcacaaaggacaccttctacaaacagcctatgttctatcatctggggcactttagcaagttcattccagagggttcccagagagtaggcttggttgcctcacagaagaatgatctggatgctgtggcactcatgcatcctgacgggagtgcagtggtggtagtactgaacaggtctagcaaagatgttcccttgactatcaaagacccagctgtgggctttctggaaaccatttcccctggatactctatccacacctatctctggagaagacagtaatga

SEQ ID NO: 104 - protein, 536 aa, synthetic construct
  REGION 1..536: note = Variant of B-Glucocerebrosidase
MEFSSPSREECPKPLSRVSIMAGSLTGLLLLQAVSWASGARPCIPKSFGYSSVVCVCNATYCDSFDPLTFPALGTFSRYESTRSGRRMELSMGPIQANHTGTGLLLTLQPEQKFQKVKGFGGAMTDAAALNILALSPPAQNLLLKSYFSEEGIGYNIIRVPMASCDFSIRTYTYADTPDDFQLHNFSLPEEDTKLKIPLIHRALQLAQRPLSLLASPWTSPTWLKTNGALNGKGSLKGQPGDIYHQTWARYFVKFLDAYAEHKLQFWAVTAENEPSAGLLSGYPFQCLGFTPEHQRDFIARDLGPTLANSTHHNVRLLMLDDQRLLLPHWAKVVLTDPEAAKYVHGIAVHWYLDFLAPAKATLGETHRLFPNTMLFASEACVGSKFWEQSVRLGSWDRGMQYSHSIITNLLYHVVGWTDWNLALNPEGGPNWVRNFVDSPIIVDITKDTFYKQPMFYHLGHFSKFIPEGSQRVGLVASQKNDLDAVALMHPDGSAVVVVLNRSSKDVPLTIKDPAVGFLETISPGYSIHTYLWRRQ

SEQ ID NO: 105 - DNA, 1614 bp, synthetic construct
  misc_feature 1..1614: note = Variant of B-Glucocerebrosidase
  source 1..1614: mol_type = other DNA
atggagttttcttctcctagtagagaagaatgccccaagccactgagcagggtgagcatcatggctggctccctcacagggctgcttcttttgcaggcagtctcatgggcctctggagccaggccctgtattcccaagtcattcggctactcctcagtggtgtgtgtatgcaatgccacctattgtgacagttttgatcctccaactttccctgctctgggtaccttctcccggtatgagagcacaagaagtggaagacgcatggagctctcaatgggcccaatacaggctaaccacactgggacaggtctgctgctgaccctccaacctgaacagaagtttcagaaagtcaagggatttggaggagccatgactgatgcagcagcactcaacatcttggccctgtctccaccagcccagaatctgctgttgaagtcctacttctcagaggaggggattggctacaacatcatccgggttcccatggctagctgtgacttctccattaggacctatacatacgctgacacccccgatgattttcagctccataatttcagtctccctgaagaagacaccaaactgaagatacctctgattcacagagccttgcaactggcacaaaggccagtgagcctcttggcttctccctggactagtcctacatggctgaagactaatggtgctgttaatgggaaaggctccctgaaaggacagccaggtgacatctatcatcagacatgggcccgctactttgtgaaattccttgatgcctatgcagagcacaagctccagttctgggcagtcaccgcagaaaacgagccctcagctgggctgctgtctggctacccctttcagtgcttgggctttactcctgagcatcaacgggacttcattgcccgggatttggggccaacactggccaacagcacccaccacaatgtaagactcctcatgctggatgaccagaggctgctgctccctcattgggccaaggtggtgttgacagacccagaagctgccaaatatgttcatggcatcgctgtccactggtacctggattttttggcccctgcaaaggctactctgggagagacccacagactcttccccaactatatgctgtttgcatcagaagcctgcgtggggagcaaattctgggagcagtctgttaggctgggttcctgggatcggggcatgcaatattcccatagtataataactaacctcctctaccacgtggtaggatggacagactggaatctggctttgaacccagaaggaggccccaattgggtgcgcaactttgttgacagccccatcattgtggatatcacaaaggacgtgttctacaaacagcctatgttctatcatctggggcactttagcaagttcattccagagggttcccagagagtaggcttggttgcctcacagaagaatgatctggatgctgtggcactcatgcatcctgacgggagtgcagtggtggtagtactgaacaggtctagcaaagatgttcccttgactatcaaagacccagctgtgggctttctggaaaccatttcccctggatactctatccacacctatctctggagaagacagtaatga

SEQ ID NO: 106 - protein, 536 aa, synthetic construct
  REGION 1..536: note = Variant of B-Glucocerebrosidase
MEFSSPSREECPKPLSRVSIMAGSLTGLLLLQAVSWASGARPCIPKSFGYSSVVCVCNATYCDSFDPPTFPALGTFSRYESTRSGRRMELSMGPIQANHTGTGLLLTLQPEQKFQKVKGFGGAMTDAAALNILALSPPAQNLLLKSYFSEEGIGYNIIRVPMASCDFSIRTYTYADTPDDFQLHNFSLPEEDTKLKIPLIHRALQLAQRPVSLLASPWTSPTWLKTNGAVNGKGSLKGQPGDIYHQTWARYFVKFLDAYAEHKLQFWAVTAENEPSAGLLSGYPFQCLGFTPEHQRDFIARDLGPTLANSTHHNVRLLMLDDQRLLLPHWAKVVLTDPEAAKYVHGIAVHWYLDFLAPAKATLGETHRLFPNYMLFASEACVGSKFWEQSVRLGSWDRGMQYSHSIITNLLYHVVGWTDWNLALNPEGGPNWVRNFVDSPIIVDITKDVFYKQPMFYHLGHFSKFIPEGSQRVGLVASQKNDLDAVALMHPDGSAVVVVLNRSSKDVPLTIKDPAVGFLETISPGYSIHTYLWRRQ

SEQ ID NO: 107 - DNA, 1614 bp, synthetic construct
  misc_feature 1..1614: note = Variant of B-Glucocerebrosidase
  source 1..1614: mol_type = other DNA
atggagttttcttctcctagtagagaagaatgccccaagccactgagcagggtgagcatcatggctggctccctcacagggctgcttcttttgcaggcagtctcatgggcctctggagccaggccctgtattcccaggtcattcggctactcctcagtggtgtgtgtatgcaatgccacctattgtgacagttttgatcctgtcactttccctgctctgggtaccttctcccggtatgagagcacaagaagtggaagacgcatggagctctcaatgggcccaatacaggctaaccacactgggacaggtctgctgctgaccctccaacctgaacagaagtttcagaaagtcaagggatttggaggagccatgactgatgcagcagcactcaacatcttggccctgtctccaccagcccagaatctgctgttgaagtcctacttctcagaggaggggattggctacaacatcatccgggttcccatggctagctgtgacttctccattaggacctatacatacgctgacacccccgatgattttcagctccataatttcagtctccctgaagaagacaccaaactgaagatacctctgattcacagagccttgcaactggcacaaaggccagtgagcctcttggcttctccctggactagtcctacatggctgaagactaatggtgctgtgaatgggaaaggctccctgaaaggacagccaggtgacatctatcatcagacatgggcccgctactttgtgaaattccttgatgcctatgcagagcacaagctccagttctgggcagtcaccgcagaaaacgagccctcagctgggctgctgtctggctacccctttcagtgcttgggctttactcctgagcatcaacgggacttcattgcccgggatttggggccaacactggccaacagcacccaccacaatgtaagactcctcatgctggatgaccagaggctgctgctccctcattgggccaaggtggtgttggctgacccagaagctgccaaatatgttcatggcatcgctgtccactggtacctggattttttggcccctgcaaaggctactctgggagagacccacagactcttccccaacaccatgctgtttgcatcagaagcctgcgtggggagcaaattctgggagcagtctgttaggctgggttcctgggatcggggcatgcaatattcccatagtataataactaacctcctctaccacgtggtaggatggacagactggaatctggctttgaacccagaaggaggccccaattgggtgcgcaactttgttgacagccccatcattgtggatatcacaaaggacacattctacaaacagcctatgttctatcatctggggcactttagcaagttcattccagagggttcccagagagtaggcttggttgcctcacagaagaatgatctggatgctgtggcactcatgcatcctgacgggagtgcagtggtggtagtactgaacaggtctagcaaagatgttcccttgactatcaaagacccagctgtgggctttctggaaaccatttcccctggatactctatccacacctatctctggagaagacagtaatga

SEQ ID NO: 108 - protein, 536 aa, synthetic construct
  REGION 1..536: note = Variant of B-Glucocerebrosidase
MEFSSPSREECPKPLSRVSIMAGSLTGLLLLQAVSWASGARPCIPRSFGYSSVVCVCNATYCDSFDPVTFPALGTFSRYESTRSGRRMELSMGPIQANHTGTGLLLTLQPEQKFQKVKGFGGAMTDAAALNILALSPPAQNLLLKSYFSEEGIGYNIIRVPMASCDFSIRTYTYADTPDDFQLHNFSLPEEDTKLKIPLIHRALQLAQRPVSLLASPWTSPTWLKTNGAVNGKGSLKGQPGDIYHQTWARYFVKFLDAYAEHKLQFWAVTAENEPSAGLLSGYPFQCLGFTPEHQRDFIARDLGPTLANSTHHNVRLLMLDDQRLLLPHWAKVVLADPEAAKYVHGIAVHWYLDFLAPAKATLGETHRLFPNTMLFASEACVGSKFWEQSVRLGSWDRGMQYSHSIITNLLYHVVGWTDWNLALNPEGGPNWVRNFVDSPIIVDITKDTFYKQPMFYHLGHFSKFIPEGSQRVGLVASQKNDLDAVALMHPDGSAVVVVLNRSSKDVPLTIKDPAVGFLETISPGYSIHTYLWRRQ

SEQ ID NO: 109 - DNA, 1614 bp, synthetic construct
  misc_feature 1..1614: note = Variant of B-Glucocerebrosidase
  source 1..1614: mol_type = other DNA
atggagttttcttctcctagtagagaagaatgccccaagccactgagcagggtgagcatcatggctggctccctcacagggctgcttcttttgcaggcagtctcatgggcctctggagccaggccctgtattcccaagtcattcggctactcctcagtggtgtgtgtatgcaatgccacctattgtgacagttttgatcctgtcactttccctgctctgggtaccttctcccggtatgagagcacaagaagtggaagacgcatggagctctcaatgggcccaatacaggctaaccacactgggacaggtctgctgctgaccctccaacctgaacagaagtttcagaaagtcaagggatttggaggagccatgactgatgcagcagcactcaacatcttggccctgtctccaccagcccagaatctgctgttgaagtcctacttctcagaggaggggattggctacaacatcatccgggttcccatggctagctgtgacttctccattaggacctatacatacgctgacacccccgatgattttcagctccataatttcagtctccctgaagaagacaccaaactgaagatacctctgattcacagagccttgcaactggcacaaaggccagtgagcctcttggcttctccctggactagtcctacatggctgaagactaatggtgctctgaatgggaaaggctccctgaaaggacagccaggtgacatctatcatcagacatgggcccgctactttgtgaaattccttgatgcctatgcagagcacaagctccagttctgggcagtcaccgcagaaaacgagccctcagctgggctgctgtctggctacccctttcagtgcttgggctttactcctgagcatcaacgggacttcattgcccgggatttggggccaacactggccaacagcacccaccacgatgtaagactcctcatgctggatgaccagaggctgctgctccctcattgggccaaggtggtgttgacagacccagaagctgccaaatatgttcatggcatcgctgtccactggtacctggattttttggcccctgcaaaggctactctgggagagacccacagactcttccccaactatatgctgtttgcatcagaagcctgcgtggggagcaaattctgggagcagtctgttaggctgggttcctgggatcggggcatgcaatattcccatagtataataactaacctcctctaccacgtggtaggatggacagactggaatctggctttgaacccagaaggaggccccaattgggtgcgcaactttgttgacagccccatcattgtggatatcacaaaggacaccttctacaaacagcctatgttctatcatctggggcactttagcaagttcattccagagggttcccagagagtaggcttggttgcctcacagaagaatgatctggatgctgtggcactcatgcatcctgacgggagtgcagtggtggtagtactgaacaggtctagcaaagatgttcccttgactatcaaagacccagctgtgggctttctggaaaccatttcccctggatactctatccacacctatctctggagaagacagtaatga

SEQ ID NO: 110 - protein, 536 aa, synthetic construct
  REGION 1..536: note = Variant of B-Glucocerebrosidase
MEFSSPSREECPKPLSRVSIMAGSLTGLLLLQAVSWASGARPCIPKSFGYSSVVCVCNATYCDSFDPVTFPALGTFSRYESTRSGRRMELSMGPIQANHTGTGLLLTLQPEQKFQKVKGFGGAMTDAAALNILALSPPAQNLLLKSYFSEEGIGYNIIRVPMASCDFSIRTYTYADTPDDFQLHNFSLPEEDTKLKIPLIHRALQLAQRPVSLLASPWTSPTWLKTNGALNGKGSLKGQPGDIYHQTWARYFVKFLDAYAEHKLQFWAVTAENEPSAGLLSGYPFQCLGFTPEHQRDFIARDLGPTLANSTHHDVRLLMLDDQRLLLPHWAKVVLTDPEAAKYVHGIAVHWYLDFLAPAKATLGETHRLFPNYMLFASEACVGSKFWEQSVRLGSWDRGMQYSHSIITNLLYHVVGWTDWNLALNPEGGPNWVRNFVDSPIIVDITKDTFYKQPMFYHLGHFSKFIPEGSQRVGLVASQKNDLDAVALMHPDGSAVVVVLNRSSKDVPLTIKDPAVGFLETISPGYSIHTYLWRRQ

SEQ ID NO: 111 - DNA, 1614 bp, synthetic construct
  misc_feature 1..1614: note = Variant of B-Glucocerebrosidase
  source 1..1614: mol_type = other DNA
atggagttttcttctcctagtagagaagaatgccccaagccactgagcagggtgagcatcatggctggctccctcacagggctgcttcttttgcaggcagtctcatgggcctctggagccaggccctgtattcccaagtcattcggctactcctcagtggtgtgtgtatgcaatgccacctattgtgacagttttgatcctgtcactttccctgctctgggtaccttctcccggtatgagagcacaagaagtggaagacgcatggagctctcaatgggcccaatacaggctaaccacactgggacaggtctgctgctgaccctccaacctgaacagaagtttcagaaagtcaagggatttggaggagccatgactgatgcagcagcactcaacatcttggccctgtctccaccagcccagaatctgctgttgaagtcctacttctcagaggaggggattggctacaacatcatccgggttcccatggctagctgtgacttctccattaggacctatacatacgctgacacccccgatgattttcagctccataatttcagtctccctgaagaagacaccaaactgaagatacctctgattcacagagccttgcaactggcacaaaggccagtgagcctcttggcttctccctggactagtcctacatggctgaagactaatggtgctgttaatgggaaaggctccctgaaaggacagccaggtgacatctatcatcagacatgggcccgctactttgtgaaattccttgatgcctatgcagaacacaagctccagttctgggcagtcaccgcagaaaacgagccctcagctgggctgctgtctggctacccctttcagtgcttgggctttactcctgagcatcaacgggacttcattgcccgggatttggggccaacactggccaacagcacccaccacaatgtaagactcctcatgctggatgaccagaggctgctgctccctcattgggccaaggtggtgttgacagacccagaagctgccaaatatgttcatggcatcgctgtccactggtacctggattttttggcccctgcaaaggctactctgggagagacccacagactcttccccaacaccatgctgtttgcatcagaagcctgcgtggggagcaaattctgggagcagtctgttaggctgggttcctgggatcggggcatgcaatattcccatagtataataactaacctcctctaccacgtggtaggatggacagactggaatctggctttgaacccagaaggaggccccaattgggtgcgcaactttgttgacagccccatcattgtggatatcacaaaggacaccttctacaaacagcctatgttctatcatctggggcactttagcaagttcattccagagggttcccagagagtaggcttggttgcctcacagaagaatgatctggatgctgtggcactcatgcatcctgacgggagtgcagtggtggtagtactgaacaggtctagcaaagatgttcccttgactatcaaagacccagctgtgggctttctggaaaccatttcccctggatactctatccacacctatctctggagaagacagtaatga

SEQ ID NO: 112 - protein, 536 aa, synthetic construct
  REGION 1..536: note = Variant of B-Glucocerebrosidase
MEFSSPSREECPKPLSRVSIMAGSLTGLLLLQAVSWASGARPCIPKSFGYSSVVCVCNATYCDSFDPVTFPALGTFSRYESTRSGRRMELSMGPIQANHTGTGLLLTLQPEQKFQKVKGFGGAMTDAAALNILALSPPAQNLLLKSYFSEEGIGYNIIRVPMASCDFSIRTYTYADTPDDFQLHNFSLPEEDTKLKIPLIHRALQLAQRPVSLLASPWTSPTWLKTNGAVNGKGSLKGQPGDIYHQTWARYFVKFLDAYAEHKLQFWAVTAENEPSAGLLSGYPFQCLGFTPEHQRDFIARDLGPTLANSTHHNVRLLMLDDQRLLLPHWAKVVLTDPEAAKYVHGIAVHWYLDFLAPAKATLGETHRLFPNTMLFASEACVGSKFWEQSVRLGSWDRGMQYSHSIITNLLYHVVGWTDWNLALNPEGGPNWVRNFVDSPIIVDITKDTFYKQPMFYHLGHFSKFIPEGSQRVGLVASQKNDLDAVALMHPDGSAVVVVLNRSSKDVPLTIKDPAVGFLETISPGYSIHTYLWRRQ

SEQ ID NO: 113 - DNA, 1614 bp, synthetic construct
  misc_feature 1..1614: note = Variant of B-Glucocerebrosidase
  source 1..1614: mol_type = other DNA
atggagttttcttctcctagtagagaagaatgccccaagccactgagcagggtgagcatcatggctggctccctcacagggctgcttcttttgcaggcagtctcatgggcctctggagccaggccctgtattcccaagtcattcggctactcctcagtggtgtgtgtatgcaatgccacctattgtgacagttttgatcctctcactttccctgctctgggtaccttctcccggtatgagagcacaagaagtggaagacgcatggagctctcaatgggcccaatacaggctaaccacactgggacaggtctgctgctgaccctccaacctgaacagaagtttcagaaagtcaagggatttggaggagccatgactgatgcagcagcactcaacatcttggccctgtctccaccagcccagaatctgctgttgaagtcctacttctcagaggaggggattggctacaacatcatccgggttcccatggctagctgtgacttctccattaggacctatacatacgctgacacccccgatgattttcagctccataatttcagtctccctgaagaagacaccaaactgaagatacctctgattcacagagccttgcaactggcacaaaggccagtgagcctcttggcttctccctggactagtcctacatggctgaagactaatggtgctgtgaatgggaaaggctccctgaaaggacagccaggtgacatctatcatcagacatgggcccgctactttgtgaaattccttgatgcctatgcagagcacaagctccagttctgggcagtcaccgcagaaaacgagccctcagctgggctgctgtctggctacccctttcagtgcttgggctttactcctgagcatcaacgggacttcattgcccgggatttggggccaacactggccaacagcacccaccacaatgtaagactcctcatgctggatgaccagaggctgctgctccctcattgggccaaggtggtgttggctgacccagaagctgccaaatatgttcatggcatcgctgtccactggtacctggattttttggcccctgcaaaggctactctgggagagacccacagactcttccccaactatatgctgtttgcatcagaagcctgcgtggggagcaaattctgggagcagtctgttaggctgggttcctgggatcggggcatgcaatattcccatagtataataactaacctcctctaccacgtggtaggatggacagactggaatctggctttgaacccagaaggaggccccaattgggtgcgcaactttgttgacagccccatcattgtggatatcacaaaggacaccttctacaaacagcctatgttctatcatctggggcactttagcaagttcattccagagggttcccagagagtaggcttggttgcctcacagaagaatgatctggatgctgtggcactcatgcatcctgacgggagtgcagtggtggtagtactgaacaggtctagcaaagatgttcccttgactatcaaagacccagctgtgggctttctggaaaccatttcccctggatactctatccacacctatctctggagaagacagtaatga

SEQ ID NO: 114 - protein, 536 aa, synthetic construct
  REGION 1..536: note = Variant of B-Glucocerebrosidase
MEFSSPSREECPKPLSRVSIMAGSLTGLLLLQAVSWASGARPCIPKSFGYSSVVCVCNATYCDSFDPLTFPALGTFSRYESTRSGRRMELSMGPIQANHTGTGLLLTLQPEQKFQKVKGFGGAMTDAAALNILALSPPAQNLLLKSYFSEEGIGYNIIRVPMASCDFSIRTYTYADTPDDFQLHNFSLPEEDTKLKIPLIHRALQLAQRPVSLLASPWTSPTWLKTNGAVNGKGSLKGQPGDIYHQTWARYFVKFLDAYAEHKLQFWAVTAENEPSAGLLSGYPFQCLGFTPEHQRDFIARDLGPTLANSTHHNVRLLMLDDQRLLLPHWAKVVLADPEAAKYVHGIAVHWYLDFLAPAKATLGETHRLFPNYMLFASEACVGSKFWEQSVRLGSWDRGMQYSHSIITNLLYHVVGWTDWNLALNPEGGPNWVRNFVDSPIIVDITKDTFYKQPMFYHLGHFSKFIPEGSQRVGLVASQKNDLDAVALMHPDGSAVVVVLNRSSKDVPLTIKDPAVGFLETISPGYSIHTYLWRRQ

SEQ ID NO: 115 - DNA, 1614 bp, synthetic construct
  misc_feature 1..1614: note = Variant of B-Glucocerebrosidase
  source 1..1614: mol_type = other DNA
atggagttttcttctcctagtagagaagaatgccccaagccactgagcagggtgagcatcatggctggctccctcacagggctgcttcttttgcaggcagtctcatgggcctctggagccaggccctgtattcccaagtcattcggctactcctcagtggtgtgtgtatgcaatgccacctattgtgacagttttgatcctccaactttccctgctctgggtaccttctcccggtatgagagcacaagaagtggaagacgcatggagctctcaatgggcccaatacaggctaaccgcactgggacaggtctgctgctgaccctccaacctgaacagaagtttcagaaagtcaagggatttggaggagccatgactgatgcagcagcactcaacatcttggccctgtctccaccagcccagaatctgctgttgaagtcctacttctcagaggaggggattgggtacaacatcatccgggttcccatggctagctgtgacttctccattaggacctatacatacgctgacacccccgatgattttcagctccataatttcagtctccctgaagaagacaccaaactgaagatacctctgattcacagagccttgcagctggcacaaaggccagtgagcctcttggcttctccctggactagtcctacatggctgaagactaatggtgctgtgaatgggaaaggctccctgaaaggacagccaggtgacatctatcatcagacatgggcccgctactttgtgaaattccttgatgcctatgcagaacacaagctccagttctgggcagtcaccgcagaaaacgagccctcagctgggctgctgtctggctacccctttcagtgcttgggctttactcctgagcatcaacgggacttcattgcccgggatttggggccaacactggccaacagcacccaccacgatgtaagactcctcatgctggatgaccagaggctgctgctccctcattgggccaaggtggtgttgactgacccagaagctgccaaatatgttcatggcatcgctgtccactggtacctggattttttggcccctgcaaaggctactctgggagagacccacagactcttccccaacaccatgctgtttgcatcagaagcctgcgtggggagcaaattctgggagcagtctgttaggctgggttcctgggatcggggcatgcaatattcccatagtataataactaacctcctctaccacgtggtaggatggacagactggaatctggctttgaacccagaaggaggccccaattgggtgcgcaactttgttgacagccccatcattgtggatatcacaaaggacaccttctacaaacagcctatgttctatcatctggggcactttagcaagttcattccagagggttcccagagagtaggcttggttgcctcacagaagaatgatctggatgctgtggcactcatgcatcctgacgggagtgcagtggtggtagtactgaacaggtctagcaaagatgttcccttgactatcaaagacccagctgtgggctttctggaaaccatttcccctggatactctatccacacctatctctggagaagacagtaatga

SEQ ID NO: 116 - protein, 536 aa, synthetic construct
  REGION 1..536: note = Variant of B-Glucocerebrosidase
MEFSSPSREECPKPLSRVSIMAGSLTGLLLLQAVSWASGARPCIPKSFGYSSVVCVCNATYCDSFDPPTFPALGTFSRYESTRSGRRMELSMGPIQANRTGTGLLLTLQPEQKFQKVKGFGGAMTDAAALNILALSPPAQNLLLKSYFSEEGIGYNIIRVPMASCDFSIRTYTYADTPDDFQLHNFSLPEEDTKLKIPLIHRALQLAQRPVSLLASPWTSPTWLKTNGAVNGKGSLKGQPGDIYHQTWARYFVKFLDAYAEHKLQFWAVTAENEPSAGLLSGYPFQCLGFTPEHQRDFIARDLGPTLANSTHHDVRLLMLDDQRLLLPHWAKVVLTDPEAAKYVHGIAVHWYLDFLAPAKATLGETHRLFPNTMLFASEACVGSKFWEQSVRLGSWDRGMQYSHSIITNLLYHVVGWTDWNLALNPEGGPNWVRNFVDSPIIVDITKDTFYKQPMFYHLGHFSKFIPEGSQRVGLVASQKNDLDAVALMHPDGSAVVVVLNRSSKDVPLTIKDPAVGFLETISPGYSIHTYLWRRQ

SEQ ID NO: 117 - DNA, 1614 bp, synthetic construct
  misc_feature 1..1614: note = Variant of B-Glucocerebrosidase
  source 1..1614: mol_type = other DNA
atggagttttcttctcctagtagagaagaatgccccaagccactgagcagggtgagcatcatggctggctccctcacagggctgcttcttttgcaggcagtctcatgggcctctggagccaggccctgtattcccaggtcattcggctactcctcagtggtgtgtgtatgcaatgccacctattgtgacagttttgatcctccaactttccctgctctgggtaccttctcccggtatgagagcacaagaagtggaagacgcatggagctctcaatgggcccaatacaggctaaccacactgggacaggtctgctgctgaccctccaacctgaacagaagtttcagaaagtcaagggatttggaggagccatgactgatgcagcagcactcaacatcttggccctgtctccaccagcccagaatctgctgttgaagtcctacttctcagaggaggggattgggtacaacatcatccgggttcccatggctagctgtgacttctccattaggacctatacatacgctgacacccccgatgattttcagctccataatttcagtctccctgaagaagacaccaaactgaagatacctctgattcacagagccttgcaactggcacaaaggccagtgagcctcttggcttctccctggactagtcctacatggctgaagactaatggtgctgttaatgggaaaggctccctgaaaggacagccaggtgacatctatcatcagacatgggcccgctactttgtgaaattccttgatgcctatgcagagcacaagctccagttctgggcagtcaccgcagaaaacgagccctcagctgggctgctgtctggctacccctttcagtgcttgggctttactcctgagcatcaacgggacttcattgcccgggatttggggccaacactggccaacagcacccaccacaatgtaagactcctcatgctggatgaccagaggctgctgctccctcattgggccaaggtggtgttgacagacccagaagctgccaaatatgttcatggcatcgctgtccactggtacctggattttttggcccctgcaaaggctactctgggagagacccacagactcttccccaacaccatgctgtttgcatcagaagcctgcgtggggagcaaattctgggagcagtctgttaggctgggttcctgggatcggggcatgcaatattcccatagtataataactaacctcctctaccacgtggtaggatggacagactggaatctggctttgaacccagaaggaggccccaattgggtgcgcaactttgttgacagccccatcattgtggatatcacaaaggacacattctacaaacagcctatgttctatcatctggggcactttagcaagttcattccagagggttcccagagagtaggcttggttgcctcacagaagaatgatctggatgctgtggcactcatgcatcctgacgggagtgcagtggtggtagtactgaacaggtctagcaaagatgttcccttgactatcaaagacccagctgtgggctttctggaaaccatttcccctggatactctatccacacctatctctggagaagacagtaatga

SEQ ID NO: 118 - protein, 536 aa, synthetic construct
  REGION 1..536: note = Variant of B-Glucocerebrosidase
MEFSSPSREECPKPLSRVSIMAGSLTGLLLLQAVSWASGARPCIPRSFGYSSVVCVCNATYCDSFDPPTFPALGTFSRYESTRSGRRMELSMGPIQANHTGTGLLLTLQPEQKFQKVKGFGGAMTDAAALNILALSPPAQNLLLKSYFSEEGIGYNIIRVPMASCDFSIRTYTYADTPDDFQLHNFSLPEEDTKLKIPLIHRALQLAQRPVSLLASPWTSPTWLKTNGAVNGKGSLKGQPGDIYHQTWARYFVKFLDAYAEHKLQFWAVTAENEPSAGLLSGYPFQCLGFTPEHQRDFIARDLGPTLANSTHHNVRLLMLDDQRLLLPHWAKVVLTDPEAAKYVHGIAVHWYLDFLAPAKATLGETHRLFPNTMLFASEACVGSKFWEQSVRLGSWDRGMQYSHSIITNLLYHVVGWTDWNLALNPEGGPNWVRNFVDSPIIVDITKDTFYKQPMFYHLGHFSKFIPEGSQRVGLVASQKNDLDAVALMHPDGSAVVVVLNRSSKDVPLTIKDPAVGFLETISPGYSIHTYLWRRQ

SEQ ID NO: 119 - DNA, 1614 bp, synthetic construct
  misc_feature 1..1614: note = Variant of B-Glucocerebrosidase
  source 1..1614: mol_type = other DNA
atggagttttcttctcctagtagagaagaatgccccaagccactgagcagggtgagcatcatggctggctccctcacagggctgcttcttttgcaggcagtctcatgggcctctggagccaggccctgtattcccaggtcattcggctactcctcagtggtgtgtgtatgcaatgccacctattgtgacagttttgatcctccaactttccctgctctgggtaccttctcccggtatgagagcacaagaagtggaagacgcatggagctctcaatgggcccaatacaggctaaccacactgggacaggtctgctgctgaccctccaacctgaacagaagtttcagaaagtcaagggatttggaggagccatgactgatgcagcagcactcaacatcttggccctgtctccaccagcccagaatctgctgttgaagtcctacttctcagaggaggggattggctacaacatcatccgggttcccatggctagctgtgacttctccattaggacctatacatacgctgacacccccgatgattttcagctccataatttcagtctccctgaagaagacaccaaactgaagatacctctgattcacagagccttgcaactggcacaaaggccagtgagcctcttggcttctccctggactagtcctacatggctgaagactaatggtgctctgaatgggaaaggctccctgaaaggacagccaggtgacatctatcatcagacatgggcccgctactttgtgaaattccttgatgcctatgcaaaacacaagctccagttctgggcagtcaccgcagaaaacgagccctcagctgggctgctgtctggctacccctttcagtgcttgggctttactcctgagcatcaacgggacttcattgcccgggatttggggccaacactggccaacagcacccaccacaatgtaagactcctcatgctggatgaccagaggctgctgctccctcattgggccaaggtggtgttgactgacccagaagctgccaaatatgttcatggcatcgctgtccactggtacctggattttttggcccctgcaaaggctactctgggagagacccacagactcttccccaacaccatgctgtttgcatcagaagcctgcgtggggagcaaattctgggagcagtctgttaggctgggttcctgggatcggggcatgcaatattcccatagtataataactaacctcctctaccacgtggtaggatggacagactggaatctggctttgaacccagaaggaggccccaattgggtgcgcaactttgttgacagccccatcattgtggatatcacaaaggacaccttctacaaacagcctatgttctatcatctggggcactttagcaagttcattccagagggttcccagagagtaggcttggttgcctcacagaagaatgatctggatgctgtggcactcatgcatcctgacgggagtgcagtggtggtagtactgaacaggtctagcaaagatgttcccttgactatcaaagacccagctgtgggctttctggaaaccatttcccctggatactctatccacacctatctctggagaagacagtaatga

SEQ ID NO: 120 - protein, 536 aa, synthetic construct
  REGION 1..536: note = Variant of B-Glucocerebrosidase
MEFSSPSREECPKPLSRVSIMAGSLTGLLLLQAVSWASGARPCIPRSFGYSSVVCVCNATYCDSFDPPTFPALGTFSRYESTRSGRRMELSMGPIQANHTGTGLLLTLQPEQKFQKVKGFGGAMTDAAALNILALSPPAQNLLLKSYFSEEGIGYNIIRVPMASCDFSIRTYTYADTPDDFQLHNFSLPEEDTKLKIPLIHRALQLAQRPVSLLASPWTSPTWLKTNGALNGKGSLKGQPGDIYHQTWARYFVKFLDAYAKHKLQFWAVTAENEPSAGLLSGYPFQCLGFTPEHQRDFIARDLGPTLANSTHHNVRLLMLDDQRLLLPHWAKVVLTDPEAAKYVHGIAVHWYLDFLAPAKATLGETHRLFPNTMLFASEACVGSKFWEQSVRLGSWDRGMQYSHSIITNLLYHVVGWTDWNLALNPEGGPNWVRNFVDSPIIVDITKDTFYKQPMFYHLGHFSKFIPEGSQRVGLVASQKNDLDAVALMHPDGSAVVVVLNRSSKDVPLTIKDPAVGFLETISPGYSIHTYLWRRQ

SEQ ID NO: 121 - DNA, 1614 bp, synthetic construct
  misc_feature 1..1614: note = Variant of B-Glucocerebrosidase
  source 1..1614: mol_type = other DNA
atggagttttcttctcctagtagagaagaatgccccaagccactgagcagggtgagcatcatggctggctccctcacagggctgcttcttttgcaggcagtctcatgggcctctggagccaggccctgtattcccaagtcattcggctactcctcagtggtgtgtgtatgcaatgccacctattgtgacagttttgatcctccaactttccctgctctgggtaccttctcccggtatgagagcacaagaagtggaagacgcatggagctctcaatgggcccaatacaggctaaccacactgggacaggtctgctgctgaccctccaacctgaacagaagtttcagaaagtcaagggatttggaggagccatgactgatgcagcagcactcaacatcttggccctgtctccaccagcccagaatctgctgttgaagtcctacttctcagaggaggggattggctacaacatcatccgggttcccatggctagctgtgacttctccattaggacctatacatacgctgacacccccgatgattttcagctccataatttcagtctccctgaagaagacaccaaactgaagatacctctgattcacagagccttgcaactggcacaaaggccagtgagcctcttggcttctccctggactagtcctacatggctgaagactaatggtgctgttaatgggaaaggctccctgaaaggacagccaggtgacatctatcatcagacatgggcccgctactttgtgaaattccttgatgcctatgcagagcacaagctccagttctgggcagtcaccgcagaaaacgagccctcagctgggctgctgtctggctacccctttcagtgcttgggctttactcctgagcatcaacgggacttcattgcccgggatttggggccaacactggccaacagcacccaccacaatgtaagactcctcatgctggatgaccagaggctgctgctccctcattgggccaaggtggtgttgactgacccagaagctgccaaatatgttcatggcatcgctgtccactggtacctggattttttggcccctgcaaaggctactctgggagagacccacagactcttccccaactatatgctgtttgcatcagaagcctgcgtggggagcaaattctgggagcagtctgttaggctgggttcctgggatcggggcatgcaatattcccatagtataataactaacctcctctaccacgtggtaggatggacagactggaatctggctttgaacccagaaggaggccccaattgggtgcgcaactttgttgacagccccatcattgtggatatcacaaaggacacattctacaaacagcctatgttctatcatctggggcactttagcaagttcattccagagggttcccagagagtaggcttggttgcctcacagaagaatgatctggatgctgtggcactcatgcatcctgacgggagtgcagtggtggtagtactgaacaggtctagcaaagatgttcccttgactatcaaagacccagctgtgggctttctggaaaccatttcccctggatactctatccacacctatctctggagaagacagtaatga

SEQ ID NO: 122 - protein, 536 aa, synthetic construct
  REGION 1..536: note = Variant of B-Glucocerebrosidase
MEFSSPSREECPKPLSRVSIMAGSLTGLLLLQAVSWASGARPCIPKSFGYSSVVCVCNATYCDSFDPPTFPALGTFSRYESTRSGRRMELSMGPIQANHTGTGLLLTLQPEQKFQKVKGFGGAMTDAAALNILALSPPAQNLLLKSYFSEEGIGYNIIRVPMASCDFSIRTYTYADTPDDFQLHNFSLPEEDTKLKIPLIHRALQLAQRPVSLLASPWTSPTWLKTNGAVNGKGSLKGQPGDIYHQTWARYFVKFLDAYAEHKLQFWAVTAENEPSAGLLSGYPFQCLGFTPEHQRDFIARDLGPTLANSTHHNVRLLMLDDQRLLLPHWAKVVLTDPEAAKYVHGIAVHWYLDFLAPAKATLGETHRLFPNYMLFASEACVGSKFWEQSVRLGSWDRGMQYSHSIITNLLYHVVGWTDWNLALNPEGGPNWVRNFVDSPIIVDITKDTFYKQPMFYHLGHFSKFIPEGSQRVGLVASQKNDLDAVALMHPDGSAVVVVLNRSSKDVPLTIKDPAVGFLETISPGYSIHTYLWRRQ

SEQ ID NO: 123 - DNA, 1614 bp, synthetic construct
  misc_feature 1..1614: note = Variant of B-Glucocerebrosidase
  source 1..1614: mol_type = other DNA
atggagttttcttctcctagtagagaagaatgccccaagccactgagcagggtgagcatcatggctggctccctcacagggctgcttcttttgcaggcagtctcatgggcctctggagccaggccctgtattcccaagtcattcggctactcctcagtggtgtgtgtatgcaatgccacctattgtgacagttttgatcctccaactttccctgctctgggtaccttctcccggtatgagagcacaagaagtggaagacgcatggagctctcaatgggcccaatacaggctaaccacactgggacaggtctgctgctgaccctccaacctgaacagaagtttcagaaagtcaagggatttggaggagccatgactgatgcagcagcactcaacatcttggccctgtctccaccagcccagaatctgctgttgaagtcctacttctcagaggaggggattggctacaacatcatccgggttcccatggctagctgtgacttctccattaggacctatacatacgctgacacccccgatgattttcagctccataatttcagtctccctgaagaagacaccaaactgaagatacctctgattcacagagccttgcaactggcacaaaggccagtgagcctcttggcttctccctggactagtcctacatggctgaagactaatggtgctctgaatgggaaaggctccctgaaaggacagccaggtgacatctatcatcagacatgggcccgctactttgtgaaattccttgatgcctatgcagagcacaagctccagttctgggcagtcaccgcagaaaacgagccctcagctgggctgctgtctggctacccctttcagtgcttgggctttactcctgagcatcaacgggacttcattgcccgggatttggggccaacactggccaacagcacccaccacgatgtaagactcctcatgctggatgaccagaggctgctgctccctcattgggccaaggtggtgttgacagacccagaagctgccaaatatgttcatggcatcgctgtccactggtacctggattttttggcccctgcaaaggctactctgggagagacccacagactcttccccaacaccatgctgtttgcatcagaagcctgcgtggggagcaaattctgggagcagtctgttaggctgggttcctgggatcggggcatgcaatattcccatagtataataactaacctcctctaccacgtggtaggatggacagactggaatctggctttgaacccagaaggaggccccaattgggtgcgcaactttgttgacagccccatcattgtggatatcacaaaggacacattctacaaacagcctatgttctatcatctggggcactttagcaagttcattccagagggttcccagagagtaggcttggttgcctcacagaagaatgatctggatgctgtggcactcatgcatcctgacgggagtgcagtggtggtagtactgaacaggtctagcaaagatgttcccttgactatcaaagacccagctgtgggctttctggaaaccatttcccctggatactctatccacacctatctctggagaagacagtaatga

SEQ ID NO: 124 - protein, 536 aa, synthetic construct
  REGION 1..536: note = Variant of B-Glucocerebrosidase
MEFSSPSREECPKPLSRVSIMAGSLTGLLLLQAVSWASGARPCIPKSFGYSSVVCVCNATYCDSFDPPTFPALGTFSRYESTRSGRRMELSMGPIQANHTGTGLLLTLQPEQKFQKVKGFGGAMTDAAALNILALSPPAQNLLLKSYFSEEGIGYNIIRVPMASCDFSIRTYTYADTPDDFQLHNFSLPEEDTKLKIPLIHRALQLAQRPVSLLASPWTSPTWLKTNGALNGKGSLKGQPGDIYHQTWARYFVKFLDAYAEHKLQFWAVTAENEPSAGLLSGYPFQCLGFTPEHQRDFIARDLGPTLANSTHHDVRLLMLDDQRLLLPHWAKVVLTDPEAAKYVHGIAVHWYLDFLAPAKATLGETHRLFPNTMLFASEACVGSKFWEQSVRLGSWDRGMQYSHSIITNLLYHVVGWTDWNLALNPEGGPNWVRNFVDSPIIVDITKDTFYKQPMFYHLGHFSKFIPEGSQRVGLVASQKNDLDAVALMHPDGSAVVVVLNRSSKDVPLTIKDPAVGFLETISPGYSIHTYLWRRQ

SEQ ID NO: 125 - DNA, 1614 bp, synthetic construct
  misc_feature 1..1614: note = Variant of B-Glucocerebrosidase
  source 1..1614: mol_type = other DNA
atggagttttcttctcctagtagagaagaatgccccaagccactgagcagggtgagcatcatggctggctccctcacagggctgcttcttttgcaggcagtctcatgggcctctggagccaggccctgtattcccaagtcattcggctactcctcagtggtgtgtgtatgcaatgccacctattgtgacagttttgatcctctcactttccctgctctgggtaccttctcccggtatgagagcacaagaagtggaagacgcatggagctctcaatgggcccaatacaggctaaccacactgggacaggtctgctgctgaccctccaacctgaacagaagtttcagaaagtcaagggatttggaggagccatgactgatgcagcagcactcaacatcttggccctgtctccaccagcccagaatctgctgttgaagtcctacttctcagaggaggggattgggtacaacatcatccgggttcccatggctagctgtgacttctccattaggacctatacatacgctgacacccccgatgattttcagctccataatttcagtctccctgaagaagacaccaaactgaagatacctctgattcacagagccttgcaactggcacaaaggccactgagcctcttggcttctccctggactagtcctacatggctgaagactaatggtgctgtgaatgggaaaggctccctgaaaggacagccaggtgacatctatcatcagacatgggcccgctactttgtgaaattccttgatgcctatgcagagcacaagctccagttctgggcagtcaccgcagaaaacgagccctcagctgggctgctgtctggctacccctttcagtgcttgggctttactcctgagcatcaacgggacttcattgcccgggatttggggccaacactggccaacagcacccaccacaatgtaagactcctcatgctggatgaccagaggctgctgctccctcattgggccaaggtggtgttgacagacccagaagctgccaaatatgttcatggcatcgctgtccactggtacctggattttttggcccctgcaaaggctactctgggagagacccacagactcttccccaacaccatgctgtttgcatcagaagcctgcgtggggagcaaattctgggagcagtctgttaggctgggttcctgggatcggggcatgcaatattcccatagtataataactaacctcctctaccacgtggtaggatggacagactggaatctggctttgaacccagaaggaggccccaattgggtgcgcaactttgttgacagccccatcattgtggatatcacaaaggacaccttctacaaacagcctatgttctatcatctggggcactttagcaagttcattccagagggttcccagagagtaggcttggttgcctcacagaagaatgatctggatgctgtggcactcatgcatcctgacgggagtgcagtggtggtagtactgaacaggtctagcaaagatgttcccttgactatcaaagacccagctgtgggctttctggaaaccatttcccctggatactctatccacacctatctctggagaagacagtaatga

SEQ ID NO: 126 - protein, 536 aa, synthetic construct
  REGION 1..536: note = Variant of B-Glucocerebrosidase
MEFSSPSREECPKPLSRVSIMAGSLTGLLLLQAVSWASGARPCIPKSFGYSSVVCVCNATYCDSFDPLTFPALGTFSRYESTRSGRRMELSMGPIQANHTGTGLLLTLQPEQKFQKVKGFGGAMTDAAALNILALSPPAQNLLLKSYFSEEGIGYNIIRVPMASCDFSIRTYTYADTPDDFQLHNFSLPEEDTKLKIPLIHRALQLAQRPLSLLASPWTSPTWLKTNGAVNGKGSLKGQPGDIYHQTWARYFVKFLDAYAEHKLQFWAVTAENEPSAGLLSGYPFQCLGFTPEHQRDFIARDLGPTLANSTHHNVRLLMLDDQRLLLPHWAKVVLTDPEAAKYVHGIAVHWYLDFLAPAKATLGETHRLFPNTMLFASEACVGSKFWEQSVRLGSWDRGMQYSHSIITNLLYHVVGWTDWNLALNPEGGPNWVRNFVDSPIIVDITKDTFYKQPMFYHLGHFSKFIPEGSQRVGLVASQKNDLDAVALMHPDGSAVVVVLNRSSKDVPLTIKDPAVGFLETISPGYSIHTYLWRRQ

SEQ ID NO: 127 - DNA, 1614 bp, synthetic construct
  misc_feature 1..1614: note = Variant of B-Glucocerebrosidase
  source 1..1614: mol_type = other DNA
atggagttttcttctcctagtagagaagaatgccccaagccactgagcagggtgagcatcatggctggctccctcacagggctgcttcttttgcaggcagtctcatgggcctctggagccaggccctgtattcccaagtcattcggctactcctcagtggtgtgtgtatgcaatgccacctattgtgacagttttgatcctgtcactttccctgctctgggtaccttctcccggtatgagagcacaagaagtggaagacgcatggagctctcaatgggcccaatacaggctaaccacactgggacaggtctgctgctgaccctccaacctgaacagaagtttcagaaagtcaagggatttggaggagccatgactgatgcagcagcactcaacatcttggccctgtctccaccagcccagaatctgctgttgaagtcctacttctcagaggaggggattgggtacaacatcatccgggttcccatggctagctgtgacttctccattaggacctatacatacgctgacacccccgatgattttcagctccataatttcagtctccctgaagaagacaccaaactgaagatacctctgattcacagagccttgcaactggcacaaaggccagtgagcctcttggcttctccctggactagtcctacatggctgaagactaatggtgctgttaatgggaaaggctccctgaaaggacagccaggtgacatctatcatcagacatgggcccgctactttgtgaaattccttgatgcctatgcagagcacaagctccagttctgggcagtcaccgcagaaaacgagccctcagctgggctgctgtctggctacccctttcagtgcttgggctttactcctgagcatcaacgggacttcattgcccgggatttggggccaacactggccaacagcacccaccacaatgtaagactcctcatgctggatgaccagaggctgctgctccctcattgggccaaggtggtgttggctgacccagaagctgccaaatatgttcatggcatcgctgtccactggtacctggattttttggcccctgcaaaggctactctgggagagacccacagactcttccccaacaccatgctgtttgcatcagaagcctgcgtggggagcaaattctgggagcagtctgttaggctgggttcctgggatcggggcatgcaatattcccatagtataataactaacctcctctaccacgtggtaggatggacagactggaatctggctttgaacccagaaggaggccccaattgggtgcgcaactttgttgacagccccatcattgtggatatcacaaaggacgtgttctacaaacagcctatgttctatcatctggggcactttagcaagttcattccagagggttcccagagagtaggcttggttgcctcacagaagaatgatctggatgctgtggcactcatgcatcctgacgggagtgcagtggtggtagtactgaacaggtctagcaaagatgttcccttgactatcaaagacccagctgtgggctttctggaaaccatttcccctggatactctatccacacctatctctggagaagacagtaatga

SEQ ID NO: 128 - protein, 536 aa, synthetic construct
  REGION 1..536: note = Variant of B-Glucocerebrosidase
MEFSSPSREECPKPLSRVSIMAGSLTGLLLLQAVSWASGARPCIPKSFGYSSVVCVCNATYCDSFDPVTFPALGTFSRYESTRSGRRMELSMGPIQANHTGTGLLLTLQPEQKFQKVKGFGGAMTDAAALNILALSPPAQNLLLKSYFSEEGIGYNIIRVPMASCDFSIRTYTYADTPDDFQLHNFSLPEEDTKLKIPLIHRALQLAQRPVSLLASPWTSPTWLKTNGAVNGKGSLKGQPGDIYHQTWARYFVKFLDAYAEHKLQFWAVTAENEPSAGLLSGYPFQCLGFTPEHQRDFIARDLGPTLANSTHHNVRLLMLDDQRLLLPHWAKVVLADPEAAKYVHGIAVHWYLDFLAPAKATLGETHRLFPNTMLFASEACVGSKFWEQSVRLGSWDRGMQYSHSIITNLLYHVVGWTDWNLALNPEGGPNWVRNFVDSPIIVDITKDVFYKQPMFYHLGHFSKFIPEGSQRVGLVASQKNDLDAVALMHPDGSAVVVVLNRSSKDVPLTIKDPAVGFLETISPGYSIHTYLWRRQ

SEQ ID NO: 129 - DNA, 1614 bp, synthetic construct
  misc_feature 1..1614: note = Variant of B-Glucocerebrosidase
  source 1..1614: mol_type = other DNA
atggagttttcttctcctagtagagaagaatgccccaagccactgagcagggtgagcatcatggctggctccctcacagggctgcttcttttgcaggcagtctcatgggcctctggagccaggccctgtattcccaggtcattcggctactcctcagtggtgtgtgtatgcaatgccacctattgtgacagttttgatcctccaactttccctgctctgggtaccttctcccggtatgagagcacaagaagtggaagacgcatggagctctcaatgggcccaatacaggctaaccacactgggacaggtctgctgctgaccctccaacctgaacagaagtttcagaaagtcaagggatttggaggagccatgactgatgcagcagcactcaacatcttggccctgtctccaccagcccagaatctgctgttgaagtcctacttctcagaggaggggattggctacaacatcatccgggttcccatggctagctgtgacttctccattaggacctatacatacgctgacacccccgatgattttcagctccataatttcagtctccctgaagaagacaccaaactgaagatacctctgattcacagagccttgcaactggcacaaaggccagtgagcctcttggcttctccctggactagtcctacatggctgaagactaatggtgctgttaatgggaaaggctccctgaaaggacagccaggtgacatctatcatcagacatgggcccgctactttgtgaaattccttgatgcctatgcagaacacaagctccagttctgggcagtcaccgcagaaaacgagccctcagctgggctgctgtctggctacccctttcagtgcttgggctttactcctgagcatcaacgggacttcattgcccgggatttggggccaacactggccaacagcacccaccacaatgtaagactcctcatgctggatgaccagaggctgctgctccctcattgggccaaggtggtgttggctgacccagaagctgccaaatatgttcatggcatcgctgtccactggtacctggattttttggcccctgcaaaggctactctgggagagacccacagactcttccccaacaccatgctgtttgcatcagaagcctgcgtggggagcaaattctgggagcagtctgttaggctgggttcctgggatcggggcatgcaatattcccatagtataataactaacctcctctaccacgtggtaggatggacagactggaatctggctttgaacccagaaggaggccccaattgggtgcgcaactttgttgacagccccatcattgtggatatcacaaaggacaccttctacaaacagcctatgttctatcatctggggcactttagcaagttcattccagagggttcccagagagtaggcttggttgcctcacagaagaatgatctggatgctgtggcactcatgcatcctgacgggagtgcagtggtggtagtactgaacaggtctagcaaagatgttcccttgactatcaaagacccagctgtgggctttctggaaaccatttcccctggatactctatccacacctatctctggagaagacagtaatga

SEQ ID NO: 130 - protein, 536 aa, synthetic construct
  REGION 1..536: note = Variant of B-Glucocerebrosidase
MEFSSPSREECPKPLSRVSIMAGSLTGLLLLQAVSWASGARPCIPRSFGYSSVVCVCNATYCDSFDPPTFPALGTFSRYESTRSGRRMELSMGPIQANHTGTGLLLTLQPEQKFQKVKGFGGAMTDAAALNILALSPPAQNLLLKSYFSEEGIGYNIIRVPMASCDFSIRTYTYADTPDDFQLHNFSLPEEDTKLKIPLIHRALQLAQRPVSLLASPWTSPTWLKTNGAVNGKGSLKGQPGDIYHQTWARYFVKFLDAYAEHKLQFWAVTAENEPSAGLLSGYPFQCLGFTPEHQRDFIARDLGPTLANSTHHNVRLLMLDDQRLLLPHWAKVVLADPEAAKYVHGIAVHWYLDFLAPAKATLGETHRLFPNTMLFASEACVGSKFWEQSVRLGSWDRGMQYSHSIITNLLYHVVGWTDWNLALNPEGGPNWVRNFVDSPIIVDITKDTFYKQPMFYHLGHFSKFIPEGSQRVGLVASQKNDLDAVALMHPDGSAVVVVLNRSSKDVPLTIKDPAVGFLETISPGYSIHTYLWRRQ

SEQ ID NO: 131 - DNA, 1614 bp, synthetic construct
  misc_feature 1..1614: note = Variant of B-Glucocerebrosidase
  source 1..1614: mol_type = other DNA
atggagttttcttctcctagtagagaagaatgccccaagccactgagcagggtgagcatcatggctggctccctcacagggctgcttcttttgcaggcagtctcatgggcctctggagccaggccctgtattcccaagtcattcggctactcctcagtggtgtgtgtatgcaatgccacctattgtgacagttttgatcctccaactttccctgctctgggtaccttctcccggtatgagagcacaagaagtggaagacgcatggagctctcaatgggcccaatacaggctaaccacactgggacaggtctgctgctgaccctccaacctgaacagaagtttcagaaagtcaagggatttggaggagccatgactgatgcagcagcactcaacatcttggccctgtctccaccagcccagaatctgctgttgaagtcctacttctcagaggaggggattgggtacaacatcatccgggttcccatggctagctgtgacttctccattaggacctatacatacgctgacacccccgatgattttcagctccataatttcagtctccctgaagaagacaccaaactgaagatacctctgattcacagagccttgcagctggcacaaaggccagtgagcctcttggcttctccctggactagtcctacatggctgaagactaatggtgctgttaatgggaaaggctccctgaaaggacagccaggtgacatctatcatcagacatgggcccgctactttgtgaaattccttgatgcctatgcagaacacaagctccagttctgggcagtcaccgcagaaaacgagccctcagctgggctgctgtctggctacccctttcagtgcttgggctttactcctgagcatcaacgggacttcattgcccgggatttggggccaacactggccaacagcacccaccacaatgtaagactcctcatgctggatgaccagaggctgctgctccctcattgggccaaggtggtgttggctgacccagaagctgccaaatatgttcatggcatcgctgtccactggtacctggattttttggcccctgcaaaggctactctgggagagacccacagactcttccccaacaccatgctgtttgcatcagaagcctgcgtggggagcaaattctgggagcagtctgttaggctgggttcctgggatcggggcatgcaatattcccatagtataataactaacctcctctaccacgtggtaggatggacagactggaatctggctttgaacccagaaggaggccccaattgggtgcgcaactttgttgacagccccatcattgtggatatcacaaaggacgtgttctacaaacagcctatgttctatcatctggggcactttagcaagttcattccagagggttcccagagagtaggcttggttgcctcacagaagaatgatctggatgctgtggcactcatgcatcctgacgggagtgcagtggtggtagtactgaacaggtctagcaaagatgttcccttgactatcaaagacccagctgtgggctttctggaaaccatttcccctggatactctatccacacctatctctggagaagacagtaatga

SEQ ID NO: 132 - protein, 536 aa, synthetic construct
  REGION 1..536: note = Variant of B-Glucocerebrosidase
MEFSSPSREECPKPLSRVSIMAGSLTGLLLLQAVSWASGARPCIPKSFGYSSVVCVCNATYCDSFDPPTFPALGTFSRYESTRSGRRMELSMGPIQANHTGTGLLLTLQPEQKFQKVKGFGGAMTDAAALNILALSPPAQNLLLKSYFSEEGIGYNIIRVPMASCDFSIRTYTYADTPDDFQLHNFSLPEEDTKLKIPLIHRALQLAQRPVSLLASPWTSPTWLKTNGAVNGKGSLKGQPGDIYHQTWARYFVKFLDAYAEHKLQFWAVTAENEPSAGLLSGYPFQCLGFTPEHQRDFIARDLGPTLANSTHHNVRLLMLDDQRLLLPHWAKVVLADPEAAKYVHGIAVHWYLDFLAPAKATLGETHRLFPNTMLFASEACVGSKFWEQSVRLGSWDRGMQYSHSIITNLLYHVVGWTDWNLALNPEGGPNWVRNFVDSPIIVDITKDVFYKQPMFYHLGHFSKFIPEGSQRVGLVASQKNDLDAVALMHPDGSAVVVVLNRSSKDVPLTIKDPAVGFLETISPGYSIHTYLWRRQ

SEQ ID NO: 133 - DNA, 1614 bp, synthetic construct
  misc_feature 1..1614: note = Variant of B-Glucocerebrosidase
  source 1..1614: mol_type = other DNA
atggagttttcttctcctagtagagaagaatgccccaagccactgagcagggtgagcatcatggctggctccctcacagggctgcttcttttgcaggcagtctcatgggcctctggagccaggccctgtattcccaggtcattcggctactcctcagtggtgtgtgtatgcaatgccacctattgtgacagttttgatcctgtcactttccctgctctgggtaccttctcccggtatgagagcacaagaagtggaagacgcatggagctctcaatgggcccaatacaggctaaccacactgggacaggtctgctgctgaccctccaacctgaacagaagtttcagaaagtcaagggatttggaggagccatgactgatgcagcagcactcaacatcttggccctgtctccaccagcccagaatctgctgttgaagtcctacttctcagaggaggggattgggtacaacatcatccgggttcccatggctagctgtgacttctccattaggacctatacatacgctgacacccccgatgattttcagctccataatttcagtctccctgaagaagacaccaaactgaagatacctctgattcacagagccttgcaactggcacaaaggccagtgagcctcttggcttctccctggactagtcctacatggctgaagactaatggtgctgtgaatgggaaaggctccctgaaaggacagccaggtgacatctatcatcagacatgggcccgctactttgtgaaattccttgatgcctatgcagagcacaagctccagttctgggcagtcaccgcagaaaacgagccctcagctgggctgctgtctggctacccctttcagtgcttgggctttactcctgagcatcaacgggacttcattgcccgggatttggggccaacactggccaacagcacccaccacaatgtaagactcctcatgctggatgaccagaggctgctgctccctcattgggccaaggtggtgttggctgacccagaagctgccaaatatgttcatggcatcgctgtccactggtacctggattttttggcccctgcaaaggctactctgggagagacccacagactcttccccaactatatgctgtttgcatcagaagcctgcgtggggagcaaattctgggagcagtctgttaggctgggttcctgggatcggggcatgcaatattcccatagtataataactaacctcctctaccacgtggtaggatggacagactggaatctggctttgaacccagaaggaggccccaattgggtgcgcaactttgttgacagccccatcattgtggatatcacaaaggacaccttctacaaacagcctatgttctatcatctggggcactttagcaagttcattccagagggttcccagagagtaggcttggttgcctcacagaagaatgatctggatgctgtggcactcatgcatcctgacgggagtgcagtggtggtagtactgaacaggtctagcaaagatgttcccttgactatcaaagacccagctgtgggctttctggaaaccatttcccctggatactctatccacacctatctctggagaagacagtaatga

SEQ ID NO: 134 - protein, 536 aa, synthetic construct
  REGION 1..536: note = Variant of B-Glucocerebrosidase
MEFSSPSREECPKPLSRVSIMAGSLTGLLLLQAVSWASGARPCIPRSFGYSSVVCVCNATYCDSFDPVTFPALGTFSRYESTRSGRRMELSMGPIQANHTGTGLLLTLQPEQKFQKVKGFGGAMTDAAALNILALSPPAQNLLLKSYFSEEGIGYNIIRVPMASCDFSIRTYTYADTPDDFQLHNFSLPEEDTKLKIPLIHRALQLAQRPVSLLASPWTSPTWLKTNGAVNGKGSLKGQPGDIYHQTWARYFVKFLDAYAEHKLQFWAVTAENEPSAGLLSGYPFQCLGFTPEHQRDFIARDLGPTLANSTHHNVRLLMLDDQRLLLPHWAKVVLADPEAAKYVHGIAVHWYLDFLAPAKATLGETHRLFPNYMLFASEACVGSKFWEQSVRLGSWDRGMQYSHSIITNLLYHVVGWTDWNLALNPEGGPNWVRNFVDSPIIVDITKDTFYKQPMFYHLGHFSKFIPEGSQRVGLVASQKNDLDAVALMHPDGSAVVVVLNRSSKDVPLTIKDPAVGFLETISPGYSIHTYLWRRQ

SEQ ID NO: 135 - DNA, 1614 bp, synthetic construct
  misc_feature 1..1614: note = Variant of B-Glucocerebrosidase
  source 1..1614: mol_type = other DNA
atggagttttcttctcctagtagagaagaatgccccaagccactgagcagggtgagcatcatggctggctccctcacagggctgcttcttttgcaggcagtctcatgggcctctggagccaggccctgtattcccaggtcattcggctactcctcagtggtgtgtgtatgcaatgccacctattgtgacagttttgatcctccaactttccctgctctgggtaccttctcccggtatgagagcacaagaagtggaagacgcatggagctctcaatgggcccaatacaggctaaccgcactgggacaggtctgctgctgaccctccaacctgaacagaagtttcagaaagtcaagggatttggaggagccatgactgatgcagcagcactcaacatcttggccctgtctccaccagcccagaatctgctgttgaagtcctacttctcagaggaggggattggctacaacatcatccgggttcccatggctagctgtgacttctccattaggacctatacatacgctgacacccccgatgattttcagctccataatttcagtctccctgaagaagacaccaaactgaagatacctctgattcacagagccttgcaactggcacaaaggccagtgagcctcttggcttctccctggactagtcctacatggctgaagactaatggtgctgttaatgggaaaggctccctgaaaggacagccaggtgacatctatcatcagacatgggcccgctactttgtgaaattccttgatgcctatgcagaacacaagctccagttctgggcagtcaccgcagaaaacgagccctcagctgggctgctgtctggctacccctttcagtgcttgggctttactcctgagcatcaacgggacttcattgcccgggatttggggccaacactggccaacagcacccaccacaatgtaagactcctcatgctggatgaccagaggctgctgctccctcattgggccaaggtggtgttgacagacccagaagctgccaaatatgttcatggcatcgctgtccactggtacctggattttttggcccctgcaaaggctactctgggagagacccacagactcttccccaacaccatgctgtttgcatcagaagcctgcgtggggagcaaattctgggagcagtctgttaggctgggttcctgggatcggggcatgcaatattcccatagtataataactaacctcctctaccacgtggtaggatggacagactggaatctggctttgaacccagaaggaggccccaattgggtgcgcaactttgttgacagccccatcattgtggatatcacaaaggacaccttctacaaacagcctatgttctatcatctggggcactttagcaagttcattccagagggttcccagagagtaggcttggttgcctcacagaagaatgatctggatgctgtggcactcatgcatcctgacgggagtgcagtggtggtagtactgaacaggtctagcaaagatgttcccttgactatcaaagacccagctgtgggctttctggaaaccatttcccctggatactctatccacacctatctctggagaagacagtaatga

SEQ ID NO: 136 - protein, 536 aa, synthetic construct
  REGION 1..536: note = Variant of B-Glucocerebrosidase
MEFSSPSREECPKPLSRVSIMAGSLTGLLLLQAVSWASGARPCIPRSFGYSSVVCVCNATYCDSFDPPTFPALGTFSRYESTRSGRRMELSMGPIQANRTGTGLLLTLQPEQKFQKVKGFGGAMTDAAALNILALSPPAQNLLLKSYFSEEGIGYNIIRVPMASCDFSIRTYTYADTPDDFQLHNFSLPEEDTKLKIPLIHRALQLAQRPVSLLASPWTSPTWLKTNGAVNGKGSLKGQPGDIYHQTWARYFVKFLDAYAEHKLQFWAVTAENEPSAGLLSGYPFQCLGFTPEHQRDFIARDLGPTLANSTHHNVRLLMLDDQRLLLPHWAKVVLTDPEAAKYVHGIAVHWYLDFLAPAKATLGETHRLFPNTMLFASEACVGSKFWEQSVRLGSWDRGMQYSHSIITNLLYHVVGWTDWNLALNPEGGPNWVRNFVDSPIIVDITKDTFYKQPMFYHLGHFSKFIPEGSQRVGLVASQKNDLDAVALMHPDGSAVVVVLNRSSKDVPLTIKDPAVGFLETISPGYSIHTYLWRRQ

SEQ ID NO: 137 - DNA, 1614 bp, synthetic construct
  misc_feature 1..1614: note = Variant of B-Glucocerebrosidase
  source 1..1614: mol_type = other DNA
atggagttttcttctcctagtagagaagaatgccccaagccactgagcagggtgagcatcatggctggctccctcacagggctgcttcttttgcaggcagtctcatgggcctctggagccaggccctgtattcccaagtcattcggctactcctcagtggtgtgtgtatgcaatgccacctattgtgacagttttgatcctccaactttccctgctctgggtaccttctcccggtatgagagcacaagaagtggaagacgcatggagctctcaatgggcccaatacaggctaaccgcactgggacaggtctgctgctgaccctccaacctgaacagaagtttcagaaagtcaagggatttggaggagccatgactgatgcagcagcactcaacatcttggccctgtctccaccagcccagaatctgctgttgaagtcctacttctcagaggaggggattggctacaacatcatccgggttcccatggctagctgtgacttctccattaggacctatacatacgctgacacccccgatgattttcagctccataatttcagtctccctgaagaagacaccaaactgaagatacctctgattcacagagccttgcaactggcacaaaggccagtgagcctcttggcttctccctggactagtcctacatggctgaagactaatggtgctgttaatgggaaaggctccctgaaaggacagccaggtgacatctatcatcagacatgggcccgctactttgtgaaattccttgatgcctatgcaaaacacaagctccagttctgggcagtcaccgcagaaaacgagccctcagctgggctgctgtctggctacccctttcagtgcttgggctttactcctgagcatcaacgggacttcattgcccgggatttggggccaacactggccaacagcacccaccacaatgtaagactcctcatgctggatgaccagaggctgctgctccctcattgggccaaggtggtgttgacagacccagaagctgccaaatatgttcatggcatcgctgtccactggtacctggattttttggcccctgcaaaggctactctgggagagacccacagactcttccccaacaccatgctgtttgcatcagaagcctgcgtggggagcaaattctgggagcagtctgttaggctgggttcctgggatcggggcatgcaatattcccatagtataataactaacctcctctaccacgtggtaggatggacagactggaatctggctttgaacccagaaggaggccccaattgggtgcgcaactttgttgacagccccatcattgtggatatcacaaaggacaccttctacaaacagcctatgttctatcatctggggcactttagcaagttcattccagagggttcccagagagtaggcttggttgcctcacagaagaatgatctggatgctgtggcactcatgcatcctgacgggagtgcagtggtggtagtactgaacaggtctagcaaagatgttcccttgactatcaaagacccagctgtgggctttctggaaaccatttcccctggatactctatccacacctatctctggagaagacagtaatga

SEQ ID NO: 138 - protein, 536 aa, synthetic construct
  REGION 1..536: note = Variant of B-Glucocerebrosidase
MEFSSPSREECPKPLSRVSIMAGSLTGLLLLQAVSWASGARPCIPKSFGYSSVVCVCNATYCDSFDPPTFPALGTFSRYESTRSGRRMELSMGPIQANRTGTGLLLTLQPEQKFQKVKGFGGAMTDAAALNILALSPPAQNLLLKSYFSEEGIGYNIIRVPMASCDFSIRTYTYADTPDDFQLHNFSLPEEDTKLKIPLIHRALQLAQRPVSLLASPWTSPTWLKTNGAVNGKGSLKGQPGDIYHQTWARYFVKFLDAYAKHKLQFWAVTAENEPSAGLLSGYPFQCLGFTPEHQRDFIARDLGPTLANSTHHNVRLLMLDDQRLLLPHWAKVVLTDPEAAKYVHGIAVHWYLDFLAPAKATLGETHRLFPNTMLFASEACVGSKFWEQSVRLGSWDRGMQYSHSIITNLLYHVVGWTDWNLALNPEGGPNWVRNFVDSPIIVDITKDTFYKQPMFYHLGHFSKFIPEGSQRVGLVASQKNDLDAVALMHPDGSAVVVVLNRSSKDVPLTIKDPAVGFLETISPGYSIHTYLWRRQ

SEQ ID NO: 139 - DNA, 1614 bp, synthetic construct
  misc_feature 1..1614: note = Variant of B-Glucocerebrosidase
  source 1..1614: mol_type = other DNA
atggagttttcttctcctagtagagaagaatgccccaagccactgagcagggtgagcatcatggctggctccctcacagggctgcttcttttgcaggcagtctcatgggcctctggagccaggccctgtattcccaagtcattcggctactcctcagtggtgtgtgtatgcaatgccacctattgtgacagttttgatcctccaactttccctgctctgggtaccttctcccggtatgagagcacaagaagtggaagacgcatggagctctcaatgggcccaatacaggctaaccgcactgggacaggtctgctgctgaccctccaacctgaacagaagtttcagaaagtcaagggatttggaggagccatgactgatgcagcagcactcaacatcttggccctgtctccaccagcccagaatctgctgttgaagtcctacttctcagaggaggggattggctacaacatcatccgggttcccatggctagctgtgacttctccattaggacctatacatacgctgacacccccgatgattttcagctccataatttcagtctccctgaagaagacaccaaactgaagatacctctgattcacagagccttgcagctggcacaaaggccagtgagcctcttggcttctccctggactagtcctacatggctgaagactaatggtgctgttaatgggaaaggctccctgaaaggacagccaggtgacatctatcatcagacatgggcccgctactttgtgaaattccttgatgcctatgcagagcacaagctccagttctgggcagtcaccgcagaaaacgagccctcagctgggctgctgtctggctacccctttcagtgcttgggctttactcctgagcatcaacgggacttcattgcccgggatttggggccaacactggccaacagcacccaccacaatgtaagactcctcatgctggatgaccagaggctgctgctccctcattgggccaaggtggtgttgacagacccagaagctgccaaatatgttcatggcatcgctgtccactggtacctggattttttggcccctgcaaaggctactctgggagagacccacagactcttccccaacaccatgctgtttgcatcagaagcctgcgtggggagcaaattctgggagcagtctgttaggctgggttcctgggatcggggcatgcaatattcccatagtataataactaacctcctctaccacgtggtaggatggacagactggaatctggctttgaacccagaaggaggccccaattgggtgcgcaactttgttgacagccccatcattgtggatatcacaaaggacaccttctacaaacagcctatgttctatcatctggggcactttagcaagttcattccagagggttcccagagagtaggcttggttgcctcacagaagaatgatctggatgctgtggcactcatgcatcctgacgggagtgcagtggtggtagtactgaacaggtctagcaaagatgttcccttgactatcaaagacccagctgtgggctttctggaaaccatttcccctggatactctatccacacctatctctggagaagacagtaatga

SEQ ID NO: 140 - protein, 536 aa, synthetic construct
  REGION 1..536: note = Variant of B-Glucocerebrosidase
MEFSSPSREECPKPLSRVSIMAGSLTGLLLLQAVSWASGARPCIPKSFGYSSVVCVCNATYCDSFDPPTFPALGTFSRYESTRSGRRMELSMGPIQANRTGTGLLLTLQPEQKFQKVKGFGGAMTDAAALNILALSPPAQNLLLKSYFSEEGIGYNIIRVPMASCDFSIRTYTYADTPDDFQLHNFSLPEEDTKLKIPLIHRALQLAQRPVSLLASPWTSPTWLKTNGAVNGKGSLKGQPGDIYHQTWARYFVKFLDAYAEHKLQFWAVTAENEPSAGLLSGYPFQCLGFTPEHQRDFIARDLGPTLANSTHHNVRLLMLDDQRLLLPHWAKVVLTDPEAAKYVHGIAVHWYLDFLAPAKATLGETHRLFPNTMLFASEACVGSKFWEQSVRLGSWDRGMQYSHSIITNLLYHVVGWTDWNLALNPEGGPNWVRNFVDSPIIVDITKDTFYKQPMFYHLGHFSKFIPEGSQRVGLVASQKNDLDAVALMHPDGSAVVVVLNRSSKDVPLTIKDPAVGFLETISPGYSIHTYLWRRQ

SEQ ID NO: 141 - DNA, 1614 bp, synthetic construct
  misc_feature 1..1614: note = Variant of B-Glucocerebrosidase
  source 1..1614: mol_type = other DNA
atggagttttcttctcctagtagagaagaatgccccaagccactgagcagggtgagcatcatggctggctccctcacagggctgcttcttttgcaggcagtctcatgggcctctggagccaggccctgtattcccaagtcattcggctactcctcagtggtgtgtgtatgcaatgccacctattgtgacagttttgatcctgtcactttccctgctctgggtaccttctcccggtatgagagcacaagaagtggaagacgcatggagctctcaatgggcccaatacaggctaaccacactgggacaggtctgctgctgaccctccaacctgaacagaagtttcagaaagtcaagggatttggaggagccatgactgatgcagcagcactcaacatcttgtccctgtctccaccagcccagaatctgctgttgaagtcctacttctcagaggaggggattgggtacaacatcatccgggttcccatggctagctgtgacttctccattaggacctatacatacgctgacacccccgatgattttcagctccataatttcagtctccctgaagaagacaccaaactgaagatacctctgattcacagagccttgcagctggcacaaaggccagtgagcctcttggcttctccctggactagtcctacatggctgaagactaatggtgctgttaatgggaaaggctccctgaaaggacagccaggtgacatctatcatcagacatgggcccgctactttgtgaaattccttgatgcctatgcagagcacaagctccagttctgggcagtcaccgcagaaaacgagccctcagctgggctgctgtctggctacccctttcagtgcttgggctttactcctgagcatcaacgggacttcattgcccgggatttggggccaacactggccaacagcacccaccacaatgtaagactcctcatgctggatgaccagaggctgctgctccctcattgggccaaggtggtgttgacagacccagaagctgccaaatatgttcatggcatcgctgtccactggtacctggattttttggcccctgcaaaggctactctgggagagacccacagactcttccccaacaccatgctgtttgcatcagaagcctgcgtggggagcaaattctgggagcagtctgttaggctgggttcctgggatcggggcatgcaatattcccatagtataataactaacctcctctaccacgtggtaggatggacagactggaatctggctttgaacccagaaggaggccccaattgggtgcgcaactttgttgacagccccatcattgtggatatcacaaaggacaccttctacaaacagcctatgttctatcatctggggcactttagcaagttcattccagagggttcccagagagtaggcttggttgcctcacagaagaatgatctggatgctgtggcactcatgcatcctgacgggagtgcagtggtggtagtactgaacaggtctagcaaagatgttcccttgactatcaaagacccagctgtgggctttctggaaaccatttcccctggatactctatccacacctatctctggagaagacagtaatga

SEQ ID NO: 142 - protein, 536 aa, synthetic construct
  REGION 1..536: note = Variant of B-Glucocerebrosidase
MEFSSPSREECPKPLSRVSIMAGSLTGLLLLQAVSWASGARPCIPKSFGYSSVVCVCNATYCDSFDPVTFPALGTFSRYESTRSGRRMELSMGPIQANHTGTGLLLTLQPEQKFQKVKGFGGAMTDAAALNILSLSPPAQNLLLKSYFSEEGIGYNIIRVPMASCDFSIRTYTYADTPDDFQLHNFSLPEEDTKLKIPLIHRALQLAQRPVSLLASPWTSPTWLKTNGAVNGKGSLKGQPGDIYHQTWARYFVKFLDAYAEHKLQFWAVTAENEPSAGLLSGYPFQCLGFTPEHQRDFIARDLGPTLANSTHHNVRLLMLDDQRLLLPHWAKVVLTDPEAAKYVHGIAVHWYLDFLAPAKATLGETHRLFPNTMLFASEACVGSKFWEQSVRLGSWDRGMQYSHSIITNLLYHVVGWTDWNLALNPEGGPNWVRNFVDSPIIVDITKDTFYKQPMFYHLGHFSKFIPEGSQRVGLVASQKNDLDAVALMHPDGSAVVVVLNRSSKDVPLTIKDPAVGFLETISPGYSIHTYLWRRQ

SEQ ID NO: 143 - DNA, 1614 bp, synthetic construct
  misc_feature 1..1614: note = Variant of B-Glucocerebrosidase
  source 1..1614: mol_type = other DNA
atggagttttcttctcctagtagagaagaatgccccaagccactgagcagggtgagcatcatggctggctccctcacagggctgcttcttttgcaggcagtctcatgggcctctggagccaggccctgtattcccaggtcattcggctactcctcagtggtgtgtgtatgcaatgccacctattgtgacagttttgatcctgtcactttccctgctctgggtaccttctcccggtatgagagcacaagaagtggaagacgcatggagctctcaatgggcccaatacaggctaaccacactgggacaggtctgctgctgaccctccaacctgaacagaagtttcagaaagtcaagggatttggaggagccatgactgatgcagcagcactcaacatcttgtccctgtctccaccagcccagaatctgctgttgaagtcctacttctcagaggaggggattgggtacaacatcatccgggttcccatggctagctgtgacttctccattaggacctatacatacgctgacacccccgatgattttcagctccataatttcagtctccctgaagaagacaccaaactgaagatacctctgattcacagagccttgcagctggcacaaaggccagtgagcctcttggcttctccctggactagtcctacatggctgaagactaatggtgctctgaatgggaaaggctccctgaaaggacagccaggtgacatctatcatcagacatgggcccgctactttgtgaaattccttgatgcctatgcagaacacaagctccagttctgggcagtcaccgcagaaaacgagccctcagctgggctgctgtctggctacccctttcagtgcttgggctttactcctgagcatcaacgggacttcattgcccgggatttggggccaacactggccaacagcacccaccacaatgtaagactcctcatgctggatgaccagaggctgctgctccctcattgggccaaggtggtgttggctgacccagaagctgccaaatatgttcatggcatcgctgtccactggtacctggattttttggcccctgcaaaggctactctgggagagacccacagactcttccccaactatatgctgtttgcatcagaagcctgcgtggggagcaaattctgggagcagtctgttaggctgggttcctgggatcggggcatgcaatattcccatagtataataactaacctcctctaccacgtggtaggatggacagactggaatctggctttgaacccagaaggaggccccaattgggtgcgcaactttgttgacagccccatcattgtggatatcacaaaggacacattctacaaacagcctatgttctatcatctggggcactttagcaagttcattccagagggttcccagagagtaggcttggttgcctcacagaagaatgatctggatgctgtggcactcatgcatcctgacgggagtgcagtggtggtagtactgaacaggtctagcaaagatgttcccttgactatcaaagacccagctgtgggctttctggaaaccatttcccctggatactctatccacacctatctctggagaagacagtaatga

SEQ ID NO: 144 - protein, 536 aa, synthetic construct
  REGION 1..536: note = Variant of B-Glucocerebrosidase
MEFSSPSREECPKPLSRVSIMAGSLTGLLLLQAVSWASGARPCIPRSFGYSSVVCVCNATYCDSFDPVTFPALGTFSRYESTRSGRRMELSMGPIQANHTGTGLLLTLQPEQKFQKVKGFGGAMTDAAALNILSLSPPAQNLLLKSYFSEEGIGYNIIRVPMASCDFSIRTYTYADTPDDFQLHNFSLPEEDTKLKIPLIHRALQLAQRPVSLLASPWTSPTWLKTNGALNGKGSLKGQPGDIYHQTWARYFVKFLDAYAEHKLQFWAVTAENEPSAGLLSGYPFQCLGFTPEHQRDFIARDLGPTLANSTHHNVRLLMLDDQRLLLPHWAKVVLADPEAAKYVHGIAVHWYLDFLAPAKATLGETHRLFPNYMLFASEACVGSKFWEQSVRLGSWDRGMQYSHSIITNLLYHVVGWTDWNLALNPEGGPNWVRNFVDSPIIVDITKDTFYKQPMFYHLGHFSKFIPEGSQRVGLVASQKNDLDAVALMHPDGSAVVVVLNRSSKDVPLTIKDPAVGFLETISPGYSIHTYLWRRQ

SEQ ID NO: 145 - DNA, 1614 bp, synthetic construct
  misc_feature 1..1614: note = Variant of B-Glucocerebrosidase
  source 1..1614: mol_type = other DNA
atggagttttcttctcctagtagagaagaatgccccaagccactgagcagggtgagcatcatggctggctccctcacagggctgcttcttttgcaggcagtctcatgggcctctggagccaggccctgtattcccaggtcattcggctactcctcagtggtgtgtgtatgcaatgccacctattgtgacagttttgatcctgtcactttccctgctctgggtaccttctcccggtatgagagcacaagaagtggaagacgcatggagctctcaatgggcccaatacaggctaaccacactgggacaggtctgctgctgaccctccaacctgaacagaagtttcagaaagtcaagggatttggaggagccatgactgatgcagcagcactcaacatcttggccctgtctccaccagcccagaatctgctgttgaagtcctacttctcagaggaggggattggctacaacatcatccgggttcccatggctagctgtgacttctccattaggacctatacatacgctgacacccccgatgattttcagctccataatttcagtctccctgaagaagacaccaaactgaagatacctctgattcacagagccttgcagctggcacaaaggccagtgagcctcttggcttctccctggactagtcctacatggctgaagactaatggtgctgttaatgggaaaggctccctgaaaggacagccaggtgacatctatcatcagacatgggcccgctactttgtgaaattccttgatgcctatgcagagcacaagctccagttctgggcagtcaccgcagaaaacgagccctcagctgggctgctgtctggctacccctttcagtgcttgggctttactcctgagcatcaacgggacttcattgcccgggatttggggccaacactggccaacagcacccaccacaatgtaagactcctcatgctggatgaccagaggctgctgctccctcattgggccaaggtggtgttgacagacccagaagctgccaaatatgttcatggcatcgctgtccactggtacctggattttttggcccctgcaaaggctactctgggagagacccacagactcttccccaacaccatgctgtttgcatcagaagcctgcgtggggagcaaattctgggagcagtctgttaggctgggttcctgggatcggggcatgcaatattcccatagtataataactaacctcctctaccacgtggtaggatggacagactggaatctggctttgaacccagaaggaggccccaattgggtgcgcaactttgttgacagccccatcattgtggatatcacaaaggacaccttctacaaacagcctatgttctatcatctggggcactttagcaagttcattccagagggttcccagagagtaggcttggttgcctcacagaagaatgatctggatgctgtggcactcatgcatcctgacgggagtgcagtggtggtagtactgaacaggtctagcaaagatgttcccttgactatcaaagacccagctgtgggctttctggaaaccatttcccctggatactctatccacacctatctctggagaagacagtaatga

SEQ ID NO: 146 - protein, 536 aa, synthetic construct
  REGION 1..536: note = Variant of B-Glucocerebrosidase
MEFSSPSREECPKPLSRVSIMAGSLTGLLLLQAVSWASGARPCIPRSFGYSSVVCVCNATYCDSFDPVTFPALGTFSRYESTRSGRRMELSMGPIQANHTGTGLLLTLQPEQKFQKVKGFGGAMTDAAALNILALSPPAQNLLLKSYFSEEGIGYNIIRVPMASCDFSIRTYTYADTPDDFQLHNFSLPEEDTKLKIPLIHRALQLAQRPVSLLASPWTSPTWLKTNGAVNGKGSLKGQPGDIYHQTWARYFVKFLDAYAEHKLQFWAVTAENEPSAGLLSGYPFQCLGFTPEHQRDFIARDLGPTLANSTHHNVRLLMLDDQRLLLPHWAKVVLTDPEAAKYVHGIAVHWYLDFLAPAKATLGETHRLFPNTMLFASEACVGSKFWEQSVRLGSWDRGMQYSHSIITNLLYHVVGWTDWNLALNPEGGPNWVRNFVDSPIIVDITKDTFYKQPMFYHLGHFSKFIPEGSQRVGLVASQKNDLDAVALMHPDGSAVVVVLNRSSKDVPLTIKDPAVGFLETISPGYSIHTYLWRRQ

SEQ ID NO: 147 - DNA, 1614 bp, synthetic construct
  misc_feature 1..1614: note = Variant of B-Glucocerebrosidase
  source 1..1614: mol_type = other DNA
atggagttttcttctcctagtagagaagaatgccccaagccactgagcagggtgagcatcatggctggctccctcacagggctgcttcttttgcaggcagtctcatgggcctctggagccaggccctgtattcccaagtcattcggctactcctcagtggtgtgtgtatgcaatgccacctattgtgacagttttgatcctctcactttccctgctctgggtaccttctcccggtatgagagcacaagaagtggaagacgcatggagctctcaatgggcccaatacaggctaaccgcactgggacaggtctgctgctgaccctccaacctgaacagaagtttcagaaagtcaagggatttggaggagccatgactgatgcagcagcactcaacatcttggccctgtctccaccagcccagaatctgctgttgaagtcctacttctcagaggaggggattgggtacaacatcatccgggttcccatggctagctgtgacttctccattaggacctatacatacgctgacacccccgatgattttcagctccataatttcagtctccctgaagaagacaccaaactgaagatacctctgattcacagagccttgcagctggcacaaaggccactgagcctcttggcttctccctggactagtcctacatggctgaagactaatggtgctctgaatgggaaaggctccctgaaaggacagccaggtgacatctatcatcagacatgggcccgctactttgtgaaattccttgatgcctatgcagagcacaagctccagttctgggcagtcaccgcagaaaacgagccctcagctgggctgctgtctggctacccctttcagtgcttgggctttactcctgagcatcaacgggacttcattgcccgggatttggggccaacactggccaacagcacccaccacaatgtaagactcctcatgctggatgaccagaggctgctgctccctcattgggccaaggtggtgttgacagacccagaagctgccaaatatgttcatggcatcgctgtccactggtacctggattttttggcccctgcaaaggctactctgggagagacccacagactcttccccaacaccatgctgtttgcatcagaagcctgcgtggggagcaaattctgggagcagtctgttaggctgggttcctgggatcggggcatgcaatattcccatagtataataactaacctcctctaccacgtggtaggatggacagactggaatctggctttgaacccagaaggaggccccaattgggtgcgcaactttgttgacagccccatcattgtggatatcacaaaggacacattctacaaacagcctatgttctatcatctggggcactttagcaagttcattccagagggttcccagagagtaggcttggttgcctcacagaagaatgatctggatgctgtggcactcatgcatcctgacgggagtgcagtggtggtagtactgaacaggtctagcaaagatgttcccttgactatcaaagacccagctgtgggctttctggaaaccatttcccctggatactctatccacacctatctctggagaagacagtaatga

SEQ ID NO: 148 - protein, 536 aa, synthetic construct
  REGION 1..536: note = Variant of B-Glucocerebrosidase
MEFSSPSREECPKPLSRVSIMAGSLTGLLLLQAVSWASGARPCIPKSFGYSSVVCVCNATYCDSFDPLTFPALGTFSRYESTRSGRRMELSMGPIQANRTGTGLLLTLQPEQKFQKVKGFGGAMTDAAALNILALSPPAQNLLLKSYFSEEGIGYNIIRVPMASCDFSIRTYTYADTPDDFQLHNFSLPEEDTKLKIPLIHRALQLAQRPLSLLASPWTSPTWLKTNGALNGKGSLKGQPGDIYHQTWARYFVKFLDAYAEHKLQFWAVTAENEPSAGLLSGYPFQCLGFTPEHQRDFIARDLGPTLANSTHHNVRLLMLDDQRLLLPHWAKVVLTDPEAAKYVHGIAVHWYLDFLAPAKATLGETHRLFPNTMLFASEACVGSKFWEQSVRLGSWDRGMQYSHSIITNLLYHVVGWTDWNLALNPEGGPNWVRNFVDSPIIVDITKDTFYKQPMFYHLGHFSKFIPEGSQRVGLVASQKNDLDAVALMHPDGSAVVVVLNRSSKDVPLTIKDPAVGFLETISPGYSIHTYLWRRQ

SEQ ID NO: 149 - DNA, 1614 bp, synthetic construct
  misc_feature 1..1614: note = Variant of B-Glucocerebrosidase
  source 1..1614: mol_type = other DNA
atggagttttcttctcctagtagagaagaatgccccaagccactgagcagggtgagcatcatggctggctccctcacagggctgcttcttttgcaggcagtctcatgggcctctggagccaggccctgtattcccaagtcattcggctactcctcagtggtgtgtgtatgcaatgccacctattgtgacagttttgatcctccaactttccctgctctgggtaccttctcccggtatgagagcacaagaagtggaagacgcatggagctctcaatgggcccaatacaggctaaccgcactgggacaggtctgctgctgaccctccaacctgaacagaagtttcagaaagtcaagggatttggaggagccatgactgatgcagcagcactcaacatcttgtccctgtctccaccagcccagaatctgctgttgaagtcctacttctcagaggaggggattgggtacaacatcatccgggttcccatggctagctgtgacttctccattaggacctatacatacgctgacacccccgatgattttcagctccataatttcagtctccctgaagaagacaccaaactgaagatacctctgattcacagagccttgcaactggcacaaaggccagtgagcctcttggcttctccctggactagtcctacatggctgaagactaatggtgctgttaatgggaaaggctccctgaaaggacagccaggtgacatctatcatcagacatgggcccgctactttgtgaaattccttgatgcctatgcagagcacaagctccagttctgggcagtcaccgcagaaaacgagccctcagctgggctgctgtctggctacccctttcagtgcttgggctttactcctgagcatcaacgggacttcattgcccgggatttggggccaacactggccaacagcacccaccacaatgtaagactcctcatgctggatgaccagaggctgctgctccctcattgggccaaggtggtgttgacagacccagaagctgccaaatatgttcatggcatcgctgtccactggtacctggattttttggcccctgcaaaggctactctgggagagacccacagactcttccccaacaccatgctgtttgcatcagaagcctgcgtggggagcaaattctgggagcagtctgttaggctgggttcctgggatcggggcatgcaatattcccatagtataataactaacctcctctaccacgtggtaggatggacagactggaatctggctttgaacccagaaggaggccccaattgggtgcgcaactttgttgacagccccatcattgtggatatcacaaaggacaccttctacaaacagcctatgttctatcatctggggcactttagcaagttcattccagagggttcccagagagtaggcttggttgcctcacagaagaatgatctggatgctgtggcactcatgcatcctgacgggagtgcagtggtggtagtactgaacaggtctagcaaagatgttcccttgactatcaaagacccagctgtgggctttctggaaaccatttcccctggatactctatccacacctatctctggagaagacagtaatga

SEQ ID NO: 150 - protein, 536 aa, synthetic construct
  REGION 1..536: note = Variant of B-Glucocerebrosidase
MEFSSPSREECPKPLSRVSIMAGSLTGLLLLQAVSWASGARPCIPKSFGYSSVVCVCNATYCDSFDPPTFPALGTFSRYESTRSGRRMELSMGPIQANRTGTGLLLTLQPEQKFQKVKGFGGAMTDAAALNILSLSPPAQNLLLKSYFSEEGIGYNIIRVPMASCDFSIRTYTYADTPDDFQLHNFSLPEEDTKLKIPLIHRALQLAQRPVSLLASPWTSPTWLKTNGAVNGKGSLKGQPGDIYHQTWARYFVKFLDAYAEHKLQFWAVTAENEPSAGLLSGYPFQCLGFTPEHQRDFIARDLGPTLANSTHHNVRLLMLDDQRLLLPHWAKVVLTDPEAAKYVHGIAVHWYLDFLAPAKATLGETHRLFPNTMLFASEACVGSKFWEQSVRLGSWDRGMQYSHSIITNLLYHVVGWTDWNLALNPEGGPNWVRNFVDSPIIVDITKDTFYKQPMFYHLGHFSKFIPEGSQRVGLVASQKNDLDAVALMHPDGSAVVVVLNRSSKDVPLTIKDPAVGFLETISPGYSIHTYLWRRQ

SEQ ID NO: 151 - DNA, 1614 bp, synthetic construct
  misc_feature 1..1614: note = Variant of B-Glucocerebrosidase
  source 1..1614: mol_type = other DNA
atggagttttcttctcctagtagagaagaatgccccaagccactgagcagggtgagcatcatggctggctccctcacagggctgcttcttttgcaggcagtctcatgggcctctggagccaggccctgtattcccaagtcattcggctactcctcagtggtgtgtgtatgcaatgccacctattgtgacagttttgatcctgtcactttccctgctctgggtaccttctcccggtatgagagcacaagaagtggaagacgcatggagctctcaatgggcccaatacaggctaaccgcactgggacaggtctgctgctgaccctccaacctgaacagaagtttcagaaagtcaagggatttggaggagccatgactgatgcagcagcactcaacatcttggccctgtctccaccagcccagaatctgctgttgaagtcctacttctcagaggaggggattggctacaacatcatccgggttcccatggctagctgtgacttctccattaggacctatacatacgctgacacccccgatgattttcagctccataatttcagtctccctgaagaagacaccaaactgaagatacctctgattcacagagccttgcaactggcacaaaggccagtgagcctcttggcttctccctggactagtcctacatggctgaagactaatggtgctgttaatgggaaaggctccctgaaaggacagccaggtgacatctatcatcagacatgggcccgctactttgtgaaattccttgatgcctatgcagagcacaagctccagttctgggcagtcaccgcagaaaacgagccctcagctgggctgctgtctggctacccctttcagtgcttgggctttactcctgagcatcaacgggacttcattgcccgggatttggggccaacactggccaacagcacccaccacaatgtaagactcctcatgctggatgaccagaggctgctgctccctcattgggccaaggtggtgttggctgacccagaagctgccaaatatgttcatggcatcgctgtccactggtacctggattttttggcccctgcaaaggctactctgggagagacccacagactcttccccaacaccatgctgtttgcatcagaagcctgcgtggggagcaaattctgggagcagtctgttaggctgggttcctgggatcggggcatgcaatattcccatagtataataactaacctcctctaccacgtggtaggatggacagactggaatctggctttgaacccagaaggaggccccaattgggtgcgcaactttgttgacagccccatcattgtggatatcacaaaggacaccttctacaaacagcctatgttctatcatctggggcactttagcaagttcattccagagggttcccagagagtaggcttggttgcctcacagaagaatgatctggatgctgtggcactcatgcatcctgacgggagtgcagtggtggtagtactgaacaggtctagcaaagatgttcccttgactatcaaagacccagctgtgggctttctggaaaccatttcccctggatactctatccacacctatctctggagaagacagtaatga

SEQ ID NO: 152 - protein, 536 aa, synthetic construct
  REGION 1..536: note = Variant of B-Glucocerebrosidase
MEFSSPSREECPKPLSRVSIMAGSLTGLLLLQAVSWASGARPCIPKSFGYSSVVCVCNATYCDSFDPVTFPALGTFSRYESTRSGRRMELSMGPIQANRTGTGLLLTLQPEQKFQKVKGFGGAMTDAAALNILALSPPAQNLLLKSYFSEEGIGYNIIRVPMASCDFSIRTYTYADTPDDFQLHNFSLPEEDTKLKIPLIHRALQLAQRPVSLLASPWTSPTWLKTNGAVNGKGSLKGQPGDIYHQTWARYFVKFLDAYAEHKLQFWAVTAENEPSAGLLSGYPFQCLGFTPEHQRDFIARDLGPTLANSTHHNVRLLMLDDQRLLLPHWAKVVLADPEAAKYVHGIAVHWYLDFLAPAKATLGETHRLFPNTMLFASEACVGSKFWEQSVRLGSWDRGMQYSHSIITNLLYHVVGWTDWNLALNPEGGPNWVRNFVDSPIIVDITKDTFYKQPMFYHLGHFSKFIPEGSQRVGLVASQKNDLDAVALMHPDGSAVVVVLNRSSKDVPLTIKDPAVGFLETISPGYSIHTYLWRRQ

SEQ ID NO: 153 - DNA, 1614 bp, synthetic construct
  misc_feature 1..1614: note = Variant of B-Glucocerebrosidase
  source 1..1614: mol_type = other DNA
atggagttttcttctcctagtagagaagaatgccccaagccactgagcagggtgagcatcatggctggctccctcacagggctgcttcttttgcaggcagtctcatgggcctctggagccaggccctgtattcccaagtcattcggctactcctcagtggtgtgtgtatgcaatgccacctattgtgacagttttgatcctccaactttccctgctctgggtaccttctcccggtatgagagcacaagaagtggaagacgcatggagctctcaatgggcccaatacaggctaaccacactgggacaggtctgctgctgaccctccaacctgaacagaagtttcagaaagtcaagggatttggaggagccatgactgatgcagcagcactcaacatcttggccctgtctccaccagcccagaatctgctgttgaagtcctacttctcagaggaggggattggctacaacatcatccgggttcccatggctagctgtgacttctccattaggacctatacatacgctgacacccccgatgattttcagctccataatttcagtctccctgaagaagacaccaaactgaagatacctctgattcacagagccttgcaactggcacaaaggccagtgagcctcttggcttctccctggactagtcctacatggctgaagactaatggtgctgttaatgggaaaggctccctgaaaggacagccaggtgacatctatcatcagacatgggcccgctactttgtgaaattccttgatgcctatgcagagcacaagctccagttctgggcagtcaccgcagaaaacgagccctcagctgggctgctgtctggctacccctttcagtgcttgggctttactcctgagcatcaacgggacttcattgcccgggatttggggccaacactggccaacagcacccaccacaatgtaagactcctcatgctggatgaccagaggctgctgctccctcattgggccaaggtggtgttgacagacccagaagctgccaaatatgttcatggcatcgctgtccactggtacctggattttttggcccctgcaaaggctactctgggagagacccacagactcttccccaacaccatgctgtttgcatcagaagcctgcgtggggagcaaattctgggagcagtctgttaggctgggttcctgggatcggggcatgcaatattcccatagtataataactaacctcctctaccacgtggtaggatggacagactggaatctggctttgaacccagaaggaggccccaattgggtgcgcaactttgttgacagccccatcattgtggatatcacaaaggacgtgttctacaaacagcctatgttctatcatctggggcactttagcaagttcattccagagggttcccagagagtaggcttggttgcctcacagaagaatgatctggatgctgtggcactcatgcatcctgacgggagtgcagtggtggtagtactgaacaggtctagcaaagatgttcccttgactatcaaagacccagctgtgggctttctggaaaccatttcccctggatactctatccacacctatctctggagaagacagtaatga

SEQ ID NO: 154 - protein, 536 aa, synthetic construct
  REGION 1..536: note = Variant of B-Glucocerebrosidase
MEFSSPSREECPKPLSRVSIMAGSLTGLLLLQAVSWASGARPCIPKSFGYSSVVCVCNATYCDSFDPPTFPALGTFSRYESTRSGRRMELSMGPIQANHTGTGLLLTLQPEQKFQKVKGFGGAMTDAAALNILALSPPAQNLLLKSYFSEEGIGYNIIRVPMASCDFSIRTYTYADTPDDFQLHNFSLPEEDTKLKIPLIHRALQLAQRPVSLLASPWTSPTWLKTNGAVNGKGSLKGQPGDIYHQTWARYFVKFLDAYAEHKLQFWAVTAENEPSAGLLSGYPFQCLGFTPEHQRDFIARDLGPTLANSTHHNVRLLMLDDQRLLLPHWAKVVLTDPEAAKYVHGIAVHWYLDFLAPAKATLGETHRLFPNTMLFASEACVGSKFWEQSVRLGSWDRGMQYSHSIITNLLYHVVGWTDWNLALNPEGGPNWVRNFVDSPIIVDITKDVFYKQPMFYHLGHFSKFIPEGSQRVGLVASQKNDLDAVALMHPDGSAVVVVLNRSSKDVPLTIKDPAVGFLETISPGYSIHTYLWRRQ

SEQ ID NO: 155 - DNA, 1614 bp, synthetic construct
  misc_feature 1..1614: note = Variant of B-Glucocerebrosidase
  source 1..1614: mol_type = other DNA
atggagttttcttctcctagtagagaagaatgccccaagccactgagcagggtgagcatcatggctggctccctcacagggctgcttcttttgcaggcagtctcatgggcctctggagccaggccctgtattcccaagtcattcggctactcctcagtggtgtgtgtatgcaatgccacctattgtgacagttttgatcctgtcactttccctgctctgggtaccttctcccggtatgagagcacaagaagtggaagacgcatggagctctcaatgggcccaatacaggctaaccgcactgggacaggtctgctgctgaccctccaacctgaacagaagtttcagaaagtcaagggatttggaggagccatgactgatgcagcagcactcaacatcttggccctgtctccaccagcccagaatctgctgttgaagtcctacttctcagaggaggggattggctacaacatcatccgggttcccatggctagctgtgacttctccattaggacctatacatacgctgacacccccgatgattttcagctccataatttcagtctccctgaagaagacaccaaactgaagatacctctgattcacagagccttgcaactggcacaaaggccagtgagcctcttggcttctccctggactagtcctacatggctgaagactaatggtgctgttaatgggaaaggctccctgaaaggacagccaggtgacatctatcatcagacatgggcccgctactttgtgaaattccttgatgcctatgcagagcacaagctccagttctgggcagtcaccgcagaaaacgagccctcagctgggctgctgtctggctacccctttcagtgcttgggctttactcctgagcatcaacgggacttcattgcccgggatttggggccaacactggccaacagcacccaccacaatgtaagactcctcatgctggatgaccagaggctgctgctccctcattgggccaaggtggtgttgacagacccagaagctgccaaatatgttcatggcatcgctgtccactggtacctggattttttggcccctgcaaaggctactctgggagagacccacagactcttccccaacaccatgctgtttgcatcagaagcctgcgtggggagcaaattctgggagcagtctgttaggctgggttcctgggatcggggcatgcaatattcccatagtataataactaacctcctctaccacgtggtaggatggacagactggaatctggctttgaacccagaaggaggccccaattgggtgcgcaactttgttgacagccccatcattgtggatatcacaaaggacaccttctacaaacagcctatgttctatcatctggggcactttagcaagttcattccagagggttcccagagagtaggcttggttgcctcacagaagaatgatctggatgctgtggcactcatgcatcctgacgggagtgcagtggtggtagtactgaacaggtctagcaaagatgttcccttgactatcaaagacccagctgtgggctttctggaaaccatttcccctggatactctatccacacctatctctggagaagacagtaatga

SEQ ID NO: 156 - protein, 536 aa, synthetic construct
  REGION 1..536: note = Variant of B-Glucocerebrosidase
MEFSSPSREECPKPLSRVSIMAGSLTGLLLLQAVSWASGARPCIPKSFGYSSVVCVCNATYCDSFDPVTFPALGTFSRYESTRSGRRMELSMGPIQANRTGTGLLLTLQPEQKFQKVKGFGGAMTDAAALNILALSPPAQNLLLKSYFSEEGIGYNIIRVPMASCDFSIRTYTYADTPDDFQLHNFSLPEEDTKLKIPLIHRALQLAQRPVSLLASPWTSPTWLKTNGAVNGKGSLKGQPGDIYHQTWARYFVKFLDAYAEHKLQFWAVTAENEPSAGLLSGYPFQCLGFTPEHQRDFIARDLGPTLANSTHHNVRLLMLDDQRLLLPHWAKVVLTDPEAAKYVHGIAVHWYLDFLAPAKATLGETHRLFPNTMLFASEACVGSKFWEQSVRLGSWDRGMQYSHSIITNLLYHVVGWTDWNLALNPEGGPNWVRNFVDSPIIVDITKDTFYKQPMFYHLGHFSKFIPEGSQRVGLVASQKNDLDAVALMHPDGSAVVVVLNRSSKDVPLTIKDPAVGFLETISPGYSIHTYLWRRQ

SEQ ID NO: 157 - DNA, 1614 bp, synthetic construct
  misc_feature 1..1614: note = Variant of B-Glucocerebrosidase
  source 1..1614: mol_type = other DNA
atggagttttcttctcctagtagagaagaatgccccaagccactgagcagggtgagcatcatggctggctccctcacagggctgcttcttttgcaggcagtctcatgggcctctggagccaggccctgtattcccaggtcattcggctactcctcagtggtgtgtgtatgcaatgccacctattgtgacagttttgatcctccaactttccctgctctgggtaccttctcccggtatgagagcacaagaagtggaagacgcatggagctctcaatgggcccaatacaggctaaccacactgggacaggtctgctgctgaccctccaacctgaacagaagtttcagaaagtcaagggatttggaggagccatgactgatgcagcagcactcaacatcttggccctgtctccaccagcccagaatctgctgttgaagtcctacttctcagaggaggggattggctacaacatcatccgggttcccatggctagctgtgacttctccattaggacctatacatacgctgacacccccgatgattttcagctccataatttcagtctccctgaagaagacaccaaactgaagatacctctgattcacagagccttgcaactggcacaaaggccagtgagcctcttggcttctccctggactagtcctacatggctgaagactaatggtgctctgaatgggaaaggctccctgaaaggacagccaggtgacatctatcatcagacatgggcccgctactttgtgaaattccttgatgcctatgcagagcacaagctccagttctgggcagtcaccgcagaaaacgagccctcagctgggctgctgtctggctacccctttcagtgcttgggctttactcctgagcatcaacgggacttcattgcccgggatttggggccaacactggccaacagcacccaccacaatgtaagactcctcatgctggatgaccagaggctgctgctccctcattgggccaaggtggtgttggctgacccagaagctgccaaatatgttcatggcatcgctgtccactggtacctggattttttggcccctgcaaaggctactctgggagagacccacagactcttccccaacaccatgctgtttgcatcagaagcctgcgtggggagcaaattctgggagcagtctgttaggctgggttcctgggatcggggcatgcaatattcccatagtataataactaacctcctctaccacgtggtaggatggacagactggaatctggctttgaacccagaaggaggccccaattgggtgcgcaactttgttgacagccccatcattgtggatatcacaaaggacacattctacaaacagcctatgttctatcatctggggcactttagcaagttcattccagagggttcccagagagtaggcttggttgcctcacagaagaatgatctggatgctgtggcactcatgcatcctgacgggagtgcagtggtggtagtactgaacaggtctagcaaagatgttcccttgactatcaaagacccagctgtgggctttctggaaaccatttcccctggatactctatccacacctatctctggagaagacagtaatga

SEQ ID NO: 158 - protein, 536 aa, synthetic construct
  REGION 1..536: note = Variant of B-Glucocerebrosidase
MEFSSPSREECPKPLSRVSIMAGSLTGLLLLQAVSWASGARPCIPRSFGYSSVVCVCNATYCDSFDPPTFPALGTFSRYESTRSGRRMELSMGPIQANHTGTGLLLTLQPEQKFQKVKGFGGAMTDAAALNILALSPPAQNLLLKSYFSEEGIGYNIIRVPMASCDFSIRTYTYADTPDDFQLHNFSLPEEDTKLKIPLIHRALQLAQRPVSLLASPWTSPTWLKTNGALNGKGSLKGQPGDIYHQTWARYFVKFLDAYAEHKLQFWAVTAENEPSAGLLSGYPFQCLGFTPEHQRDFIARDLGPTLANSTHHNVRLLMLDDQRLLLPHWAKVVLADPEAAKYVHGIAVHWYLDFLAPAKATLGETHRLFPNTMLFASEACVGSKFWEQSVRLGSWDRGMQYSHSIITNLLYHVVGWTDWNLALNPEGGPNWVRNFVDSPIIVDITKDTFYKQPMFYHLGHFSKFIPEGSQRVGLVASQKNDLDAVALMHPDGSAVVVVLNRSSKDVPLTIKDPAVGFLETISPGYSIHTYLWRRQ

SEQ ID NO: 159 - DNA, 1614 bp, synthetic construct
  misc_feature 1..1614: note = Variant of B-Glucocerebrosidase
  source 1..1614: mol_type = other DNA
atggagttttcttctcctagtagagaagaatgccccaagccactgagcagggtgagcatcatggctggctccctcacagggctgcttcttttgcaggcagtctcatgggcctctggagccaggccctgtattcccaagtcattcggctactcctcagtggtgtgtgtatgcaatgccacctattgtgacagttttgatcctgtcactttccctgctctgggtaccttctcccggtatgagagcacaagaagtggaagacgcatggagctctcaatgggcccaatacaggctaaccacactgggacaggtctgctgctgaccctccaacctgaacagaagtttcagaaagtcaagggatttggaggagccatgactgatgcagcagcactcaacatcttggccctgtctccaccagcccagaatctgctgttgaagtcctacttctcagaggaggggattgagtacaacatcatccgggttcccatggctagctgtgacttctccattaggacctatacatacgctgacacccccgatgattttcagctccataatttcagtctccctgaagaagacaccaaactgaagatacctctgattcacagagccttgcaactggcacaaaggccagtgagcctcttggcttctccctggactagtcctacatggctgaagactaatggtgctgtgaatgggaaaggctccctgaaaggacagccaggtgacatctatcatcagacatgggcccgctactttgtgaaattccttgatgcctatgcagagcacaagctccagttctgggcagtcaccgcagaaaacgagccctcagctgggctgctgtctggctacccctttcagtgcttgggctttactcctgagcatcaacgggacttcattgcccgggatttggggccaacactggccaacagcacccaccacaatgtaagactcctcatgctggatgaccagaggctgctgctccctcattgggccaaggtggtgttgacagacccagaagctgccaaatatgttcatggcatcgctgtccactggtacctggattttttggcccctgcaaaggctactctgggagagacccacagactcttccccaacaccatgctgtttgcatcagaagcctgcgtggggagcaaattctgggagcagtctgttaggctgggttcctgggatcggggcatgcaatattcccatagtataataactaacctcctctaccacgtggtaggatggacagactggaatctggctttgaacccagaaggaggccccaattgggtgcgcaactttgttgacagccccatcattgtggatatcacaaaggacgtgttctacaaacagcctatgttctatcatctggggcactttagcaagttcattccagagggttcccagagagtaggcttggttgcctcacagaagaatgatctggatgctgtggcactcatgcatcctgacgggagtgcagtggtggtagtactgaacaggtctagcaaagatgttcccttgactatcaaagacccagctgtgggctttctggaaaccatttcccctggatactctatccacacctatctctggagaagacagtaatga

SEQ ID NO: 160 - protein, 536 aa, synthetic construct
  REGION 1..536: note = Variant of B-Glucocerebrosidase
MEFSSPSREECPKPLSRVSIMAGSLTGLLLLQAVSWASGARPCIPKSFGYSSVVCVCNATYCDSFDPVTFPALGTFSRYESTRSGRRMELSMGPIQANHTGTGLLLTLQPEQKFQKVKGFGGAMTDAAALNILALSPPAQNLLLKSYFSEEGIEYNIIRVPMASCDFSIRTYTYADTPDDFQLHNFSLPEEDTKLKIPLIHRALQLAQRPVSLLASPWTSPTWLKTNGAVNGKGSLKGQPGDIYHQTWARYFVKFLDAYAEHKLQFWAVTAENEPSAGLLSGYPFQCLGFTPEHQRDFIARDLGPTLANSTHHNVRLLMLDDQRLLLPHWAKVVLTDPEAAKYVHGIAVHWYLDFLAPAKATLGETHRLFPNTMLFASEACVGSKFWEQSVRLGSWDRGMQYSHSIITNLLYHVVGWTDWNLALNPEGGPNWVRNFVDSPIIVDITKDVFYKQPMFYHLGHFSKFIPEGSQRVGLVASQKNDLDAVALMHPDGSAVVVVLNRSSKDVPLTIKDPAVGFLETISPGYSIHTYLWRRQ

SEQ ID NO: 161 - DNA, 1614 bp, synthetic construct
  misc_feature 1..1614: note = Variant of B-Glucocerebrosidase
  source 1..1614: mol_type = other DNA
atggagttttcttctcctagtagagaagaatgccccaagccactgagcagggtgagcatcatggctggctccctcacagggctgcttcttttgcaggcagtctcatgggcctctggagccaggccctgtattcccaagtcattcggctactcctcagtggtgtgtgtatgcaatgccacctattgtgacagttttgatcctccaactttccctgctctgggtaccttctcccggtatgagagcacaagaagtggaagacgcatggagctctcaatgggcccaatacaggctaaccacactgggacaggtctgctgctgaccctccaacctgaacagaagtttcagaaagtcaagggatttggaggagccatgactgatgcagcagcactcaacatcttggccctgtctccaccagcccagaatctgctgttgaagtcctacttctcagaggaggggattgggtacaacatcatccgggttcccatggctagctgtgacttctccattaggacctatacatacgctgacacccccgatgattttcagctccataatttcagtctccctgaagaagacaccaaactgaagatacctctgattcacagagccttgcaactggcacaaaggccagtgagcctcttggcttctccctggactagtcctacatggctgaagactaatggtgctgttaatgggaaaggctccctgaaaggacagccaggtgacatctatcatcagacatgggcccgctactttgtgaaattccttgatgcctatgcagagcacaagctccagttctgggcagtcaccgcagaaaacgagccctcagctgggctgctgtctggctacccctttcagtgcttgggctttactcctgagcatcaacgggacttcattgcccgggatttggggccaacactggccaacagcacccaccacaatgtaagactcctcatgctggatgaccagaggctgctgctccctcattgggccaaggtggtgttggctgacccagaagctgccaaatatgttcatggcatcgctgtccactggtacctggattttttggcccctgcaaaggctactctgggagagacccacagactcttccccaactatatgctgtttgcatcagaagcctgcgtggggagcaaattctgggagcagtctgttaggctgggttcctgggatcggggcatgcaatattcccatagtataataactaacctcctctaccacgtggtaggatggacagactggaatctggctttgaacccagaaggaggccccaattgggtgcgcaactttgttgacagccccatcattgtggatatcacaaaggacgtgttctacaaacagcctatgttctatcatctggggcactttagcaagttcattccagagggttcccagagagtaggcttggttgcctcacagaagaatgatctggatgctgtggcactcatgcatcctgacgggagtgcagtggtggtagtactgaacaggtctagcaaagatgttcccttgactatcaaagacccagctgtgggctttctggaaaccatttcccctggatactctatccacacctatctctggagaagacagtaatga

SEQ ID NO: 162 - protein, 536 aa, synthetic construct
  REGION 1..536: note = Variant of B-Glucocerebrosidase
MEFSSPSREECPKPLSRVSIMAGSLTGLLLLQAVSWASGARPCIPKSFGYSSVVCVCNATYCDSFDPPTFPALGTFSRYESTRSGRRMELSMGPIQANHTGTGLLLTLQPEQKFQKVKGFGGAMTDAAALNILALSPPAQNLLLKSYFSEEGIGYNIIRVPMASCDFSIRTYTYADTPDDFQLHNFSLPEEDTKLKIPLIHRALQLAQRPVSLLASPWTSPTWLKTNGAVNGKGSLKGQPGDIYHQTWARYFVKFLDAYAEHKLQFWAVTAENEPSAGLLSGYPFQCLGFTPEHQRDFIARDLGPTLANSTHHNVRLLMLDDQRLLLPHWAKVVLADPEAAKYVHGIAVHWYLDFLAPAKATLGETHRLFPNYMLFASEACVGSKFWEQSVRLGSWDRGMQYSHSIITNLLYHVVGWTDWNLALNPEGGPNWVRNFVDSPIIVDITKDVFYKQPMFYHLGHFSKFIPEGSQRVGLVASQKNDLDAVALMHPDGSAVVVVLNRSSKDVPLTIKDPAVGFLETISPGYSIHTYLWRRQ

SEQ ID NO: 163 - DNA, 1614 bp, synthetic construct
  misc_feature 1..1614: note = Variant of B-Glucocerebrosidase
  source 1..1614: mol_type = other DNA
atggagttttcttctcctagtagagaagaatgccccaagccactgagcagggtgagcatcatggctggctccctcacagggctgcttcttttgcaggcagtctcatgggcctctggagccaggccctgtattcccaagtcattcggctactcctcagtggtgtgtgtatgcaatgccacctattgtgacagttttgatcctccaactttccctgctctgggtaccttctcccggtatgagagcacaagaagtggaagacgcatggagctctcaatgggcccaatacaggctaaccacactgggacaggtctgctgctgaccctccaacctgaacagaagtttcagaaagtcaagggatttggaggagccatgactgatgcagcagcactcaacatcttgtccctgtctccaccagcccagaatctgctgttgaagtcctacttctcagaggaggggattggctacaacatcatccgggttcccatggctagctgtgacttctccattaggacctatacatacgctgacacccccgatgattttcagctccataatttcagtctccctgaagaagacaccaaactgaagatacctctgattcacagagccttgcaactggcacaaaggccagtgagcctcttggcttctccctggactagtcctacatggctgaagactaatggtgctgttaatgggaaaggctccctgaaaggacagccaggtgacatctatcatcagacatgggcccgctactttgtgaaattccttgatgcctatgcagagcacaagctccagttctgggcagtcaccgcagaaaacgagccctcagctgggctgctgtctggctacccctttcagtgcttgggctttactcctgagcatcaacgggacttcattgcccgggatttggggccaacactggccaacagcacccaccacaatgtaagactcctcatgctggatgaccagaggctgctgctccctcattgggccaaggtggtgttggctgacccagaagctgccaaatatgttcatggcatcgctgtccactggtacctggattttttggcccctgcaaaggctactctgggagagacccacagactcttccccaacaccatgctgtttgcatcagaagcctgcgtggggagcaaattctgggagcagtctgttaggctgggttcctgggatcggggcatgcaatattcccatagtataataactaacctcctctaccacgtggtaggatggacagactggaatctggctttgaacccagaaggaggccccaattgggtgcgcaactttgttgacagccccatcattgtggatatcacaaaggacaccttctacaaacagcctatgttctatcatctggggcactttagcaagttcattccagagggttcccagagagtaggcttggttgcctcacagaagaatgatctggatgctgtggcactcatgcatcctgacgggagtgcagtggtggtagtactgaacaggtctagcaaagatgttcccttgactatcaaagacccagctgtgggctttctggaaaccatttcccctggatactctatccacacctatctctggagaagacagtaatga

SEQ ID NO: 164 - protein, 536 aa, synthetic construct
  REGION 1..536: note = Variant of B-Glucocerebrosidase
MEFSSPSREECPKPLSRVSIMAGSLTGLLLLQAVSWASGARPCIPKSFGYSSVVCVCNATYCDSFDPPTFPALGTFSRYESTRSGRRMELSMGPIQANHTGTGLLLTLQPEQKFQKVKGFGGAMTDAAALNILSLSPPAQNLLLKSYFSEEGIGYNIIRVPMASCDFSIRTYTYADTPDDFQLHNFSLPEEDTKLKIPLIHRALQLAQRPVSLLASPWTSPTWLKTNGAVNGKGSLKGQPGDIYHQTWARYFVKFLDAYAEHKLQFWAVTAENEPSAGLLSGYPFQCLGFTPEHQRDFIARDLGPTLANSTHHNVRLLMLDDQRLLLPHWAKVVLADPEAAKYVHGIAVHWYLDFLAPAKATLGETHRLFPNTMLFASEACVGSKFWEQSVRLGSWDRGMQYSHSIITNLLYHVVGWTDWNLALNPEGGPNWVRNFVDSPIIVDITKDTFYKQPMFYHLGHFSKFIPEGSQRVGLVASQKNDLDAVALMHPDGSAVVVVLNRSSKDVPLTIKDPAVGFLETISPGYSIHTYLWRRQ

SEQ ID NO: 165 - DNA, 1614 bp, synthetic construct
  misc_feature 1..1614: note = Variant of B-Glucocerebrosidase
  source 1..1614: mol_type = other DNA
atggagttttcttctcctagtagagaagaatgccccaagccactgagcagggtgagcatcatggctggctccctcacagggctgcttcttttgcaggcagtctcatgggcctctggagccaggccctgtattcccaagtcattcggctactcctcagtggtgtgtgtatgcaatgccacctattgtgacagttttgatcctgtcactttccctgctctgggtaccttctcccggtatgagagcacaagaagtggaagacgcatggagctctcaatgggcccaatacaggctaaccgcactgggacaggtctgctgctgaccctccaacctgaacagaagtttcagaaagtcaagggatttggaggagccatgactgatgcagcagcactcaacatcttggccctgtctccaccagcccagaatctgctgttgaagtcctacttctcagaggaggggattgggtacaacatcatccgggttcccatggctagctgtgacttctccattaggacctatacatacgctgacacccccgatgattttcagctccataatttcagtctccctgaagaagacaccaaactgaagatacctctgattcacagagccttgcaactggcacaaaggccagtgagcctcttggcttctccctggactagtcctacatggctgaagactaatggtgctctgaatgggaaaggctccctgaaaggacagccaggtgacatctatcatcagacatgggcccgctactttgtgaaattccttgatgcctatgcagagcacaagctccagttctgggcagtcaccgcagaaaacgagccctcagctgggctgctgtctggctacccctttcagtgcttgggctttactcctgagcatcaacgggacttcattgcccgggatttggggccaacactggccaacagcacccaccacaatgtaagactcctcatgctggatgaccagaggctgctgctccctcattgggccaaggtggtgttgacagacccagaagctgccaaatatgttcatggcatcgctgtccactggtacctggattttttggcccctgcaaaggctactctgggagagacccacagactcttccccaacaccatgctgtttgcatcagaagcctgcgtggggagcaaattctgggagcagtctgttaggctgggttcctgggatcggggcatgcaatattcccatagtataataactaacctcctctaccacgtggtaggatggacagactggaatctggctttgaacccagaaggaggccccaattgggtgcgcaactttgttgacagccccatcattgtggatatcacaaaggacaccttctacaaacagcctatgttctatcatctggggcactttagcaagttcattccagagggttcccagagagtaggcttggttgcctcacagaagaatgatctggatgctgtggcactcatgcatcctgacgggagtgcagtggtggtagtactgaacaggtctagcaaagatgttcccttgactatcaaagacccagctgtgggctttctggaaaccatttcccctggatactctatccacacctatctctggagaagacagtaatga

SEQ ID NO: 166 - protein, 536 aa, synthetic construct
  REGION 1..536: note = Variant of B-Glucocerebrosidase
MEFSSPSREECPKPLSRVSIMAGSLTGLLLLQAVSWASGARPCIPKSFGYSSVVCVCNATYCDSFDPVTFPALGTFSRYESTRSGRRMELSMGPIQANRTGTGLLLTLQPEQKFQKVKGFGGAMTDAAALNILALSPPAQNLLLKSYFSEEGIGYNIIRVPMASCDFSIRTYTYADTPDDFQLHNFSLPEEDTKLKIPLIHRALQLAQRPVSLLASPWTSPTWLKTNGALNGKGSLKGQPGDIYHQTWARYFVKFLDAYAEHKLQFWAVTAENEPSAGLLSGYPFQCLGFTPEHQRDFIARDLGPTLANSTHHNVRLLMLDDQRLLLPHWAKVVLTDPEAAKYVHGIAVHWYLDFLAPAKATLGETHRLFPNTMLFASEACVGSKFWEQSVRLGSWDRGMQYSHSIITNLLYHVVGWTDWNLALNPEGGPNWVRNFVDSPIIVDITKDTFYKQPMFYHLGHFSKFIPEGSQRVGLVASQKNDLDAVALMHPDGSAVVVVLNRSSKDVPLTIKDPAVGFLETISPGYSIHTYLWRRQ

SEQ ID NO: 167 - DNA, 1614 bp, synthetic construct
  misc_feature 1..1614: note = Variant of B-Glucocerebrosidase
  source 1..1614: mol_type = other DNA
atggagttttcttctcctagtagagaagaatgccccaagccactgagcagggtgagcatcatggctggctccctcacagggctgcttcttttgcaggcagtctcatgggcctctggagccaggccctgtattcccaagtcattcggctactcctcagtggtgtgtgtatgcaatgccacctattgtgacagttttgatcctctcactttccctgctctgggtaccttctcccggtatgagagcacaagaagtggaagacgcatggagctctcaatgggcccaatacaggctaaccacactgggacaggtctgctgctgaccctccaacctgaacagaagtttcagaaagtcaagggatttggaggagccatgactgatgcagcagcactcaacatcttggccctgtctccaccagcccagaatctgctgttgaagtcctacttctcagaggaggggattggctacaacatcatccgggttcccatggctagctgtgacttctccattaggacctatacatacgctgacacccccgatgattttcagctccataatttcagtctccctgaagaagacaccaaactgaagatacctctgattcacagagccttgcaactggcacaaaggccagtgagcctcttggcttctccctggactagtcctacatggctgaagactaatggtgctgttaatgggaaaggctccctgaaaggacagccaggtgacatctatcatcagacatgggcccgctactttgtgaaattccttgatgcctatgcagaacacaagctccagttctgggcagtcaccgcagaaaacgagccctcagctgggctgctgtctggctacccctttcagtgcttgggctttactcctgagcatcaacgggacttcattgcccgggatttggggccaacactggccaacagcacccaccacaatgtaagactcctcatgctggatgaccagaggctgctgctccctcattgggccaaggtggtgttgacagacccagaagctgccaaatatgttcatggcatcgctgtccactggtacctggattttttggcccctgcaaaggctactctgggagagacccacagactcttccccaacaccatgctgtttgcatcagaagcctgcgtggggagcaaattctgggagcagtctgttaggctgggttcctgggatcggggcatgcaatattcccatagtataataactaacctcctctaccacgtggtaggatggacagactggaatctggctttgaacccagaaggaggccccaattgggtgcgcaactttgttgacagccccatcattgtggatatcacaaaggacaccttctacaaacagcctatgttctatcatctggggcactttagcaagttcattccagagggttcccagagagtaggcttggttgcctcacagaagaatgatctggatgctgtggcactcatgcatcctgacgggagtgcagtggtggtagtactgaacaggtctagcaaagatgttcccttgactatcaaagacccagctgtgggctttctggaaaccatttcccctggatactctatccacacctatctctggagaagacagtaatga

SEQ ID NO: 168 - protein, 536 aa, synthetic construct
  REGION 1..536: note = Variant of B-Glucocerebrosidase
MEFSSPSREECPKPLSRVSIMAGSLTGLLLLQAVSWASGARPCIPKSFGYSSVVCVCNATYCDSFDPLTFPALGTFSRYESTRSGRRMELSMGPIQANHTGTGLLLTLQPEQKFQKVKGFGGAMTDAAALNILALSPPAQNLLLKSYFSEEGIGYNIIRVPMASCDFSIRTYTYADTPDDFQLHNFSLPEEDTKLKIPLIHRALQLAQRPVSLLASPWTSPTWLKTNGAVNGKGSLKGQPGDIYHQTWARYFVKFLDAYAEHKLQFWAVTAENEPSAGLLSGYPFQCLGFTPEHQRDFIARDLGPTLANSTHHNVRLLMLDDQRLLLPHWAKVVLTDPEAAKYVHGIAVHWYLDFLAPAKATLGETHRLFPNTMLFASEACVGSKFWEQSVRLGSWDRGMQYSHSIITNLLYHVVGWTDWNLALNPEGGPNWVRNFVDSPIIVDITKDTFYKQPMFYHLGHFSKFIPEGSQRVGLVASQKNDLDAVALMHPDGSAVVVVLNRSSKDVPLTIKDPAVGFLETISPGYSIHTYLWRRQ

SEQ ID NO: 169 - DNA, 1614 bp, synthetic construct
  misc_feature 1..1614: note = Variant of B-Glucocerebrosidase
  source 1..1614: mol_type = other DNA
atggagttttcttctcctagtagagaagaatgccccaagccactgagcagggtgagcatcatggctggctccctcacagggctgcttcttttgcaggcagtctcatgggcctctggagccaggccctgtattcccaggtcattcggctactcctcagtggtgtgtgtatgcaatgccacctattgtgacagttttgatcctgtcactttccctgctctgggtaccttctcccggtatgagagcacaagaagtggaagacgcatggagctctcaatgggcccaatacaggctaaccacactgggacaggtctgctgctgaccctccaacctgaacagaagtttcagaaagtcaagggatttggaggagccatgactgatgcagcagcactcaacatcttgtccctgtctccaccagcccagaatctgctgttgaagtcctacttctcagaggaggggattgagtacaacatcatccgggttcccatggctagctgtgacttctccattaggacctatacatacgctgacacccccgatgattttcagctccataatttcagtctccctgaagaagacaccaaactgaagatacctctgattcacagagccttgcagctggcacaaaggccagtgagcctcttggcttctccctggactagtcctacatggctgaagactaatggtgctgttaatgggaaaggctccctgaaaggacagccaggtgacatctatcatcagacatgggcccgctactttgtgaaattccttgatgcctatgcagaacacaagctccagttctgggcagtcaccgcagaaaacgagccctcagctgggctgctgtctggctacccctttcagtgcttgggctttactcctgagcatcaacgggacttcattgcccgggatttggggccaacactggccaacagcacccaccacaatgtaagactcctcatgctggatgaccagaggctgctgctccctcattgggccaaggtggtgttgactgacccagaagctgccaaatatgttcatggcatcgctgtccactggtacctggattttttggcccctgcaaaggctactctgggagagacccacagactcttccccaacaccatgctgtttgcatcagaagcctgcgtggggagcaaattctgggagcagtctgttaggctgggttcctgggatcggggcatgcaatattcccatagtataataactaacctcctctaccacgtggtaggatggacagactggaatctggctttgaacccagaaggaggccccaattgggtgcgcaactttgttgacagccccatcattgtggatatcacaaaggacaccttctacaaacagcctatgttctatcatctggggcactttagcaagttcattccagagggttcccagagagtaggcttggttgcctcacagaagaatgatctggatgctgtggcactcatgcatcctgacgggagtgcagtggtggtagtactgaacaggtctagcaaagatgttcccttgactatcaaagacccagctgtgggctttctggaaaccatttcccctggatactctatccacacctatctctggagaagacagtaatga

SEQ ID NO: 170 - protein, 536 aa, synthetic construct
  REGION 1..536: note = Variant of B-Glucocerebrosidase
MEFSSPSREECPKPLSRVSIMAGSLTGLLLLQAVSWASGARPCIPRSFGYSSVVCVCNATYCDSFDPVTFPALGTFSRYESTRSGRRMELSMGPIQANHTGTGLLLTLQPEQKFQKVKGFGGAMTDAAALNILSLSPPAQNLLLKSYFSEEGIEYNIIRVPMASCDFSIRTYTYADTPDDFQLHNFSLPEEDTKLKIPLIHRALQLAQRPVSLLASPWTSPTWLKTNGAVNGKGSLKGQPGDIYHQTWARYFVKFLDAYAEHKLQFWAVTAENEPSAGLLSGYPFQCLGFTPEHQRDFIARDLGPTLANSTHHNVRLLMLDDQRLLLPHWAKVVLTDPEAAKYVHGIAVHWYLDFLAPAKATLGETHRLFPNTMLFASEACVGSKFWEQSVRLGSWDRGMQYSHSIITNLLYHVVGWTDWNLALNPEGGPNWVRNFVDSPIIVDITKDTFYKQPMFYHLGHFSKFIPEGSQRVGLVASQKNDLDAVALMHPDGSAVVVVLNRSSKDVPLTIKDPAVGFLETISPGYSIHTYLWRRQ

SEQ ID NO: 171 - DNA, 1614 bp, synthetic construct
  misc_feature 1..1614: note = Variant of B-Glucocerebrosidase
  source 1..1614: mol_type = other DNA
atggagttttcttctcctagtagagaagaatgccccaagccactgagcagggtgagcatcatggctggctccctcacagggctgcttcttttgcaggcagtctcatgggcctctggagccaggccctgtattcccaagtcattcggctactcctcagtggtgtgtgtatgcaatgccacctattgtgacagttttgatcctgtcactttccctgctctgggtaccttctcccggtatgagagcacaagaagtggaagacgcatggagctctcaatgggcccaatacaggctaaccgcactgggacaggtctgctgctgaccctccaacctgaacagaagtttcagaaagtcaagggatttggaggagccatgactgatgcagcagcactcaacatcttggccctgtctccaccagcccagaatctgctgttgaagtcctacttctcagaggaggggattggctacaacatcatccgggttcccatggctagctgtgacttctccattaggacctatacatacgctgacacccccgatgattttcagctccataatttcagtctccctgaagaagacaccaaactgaagatacctctgattcacagagccttgcaactggcacaaaggccagtgagcctcttggcttctccctggactagtcctacatggctgaagactaatggtgctctgaatgggaaaggctccctgaaaggacagccaggtgacatctatcatcagacatgggcccgctactttgtgaaattccttgatgcctatgcagagcacaagctccagttctgggcagtcaccgcagaaaacgagccctcagctgggctgctgtctggctacccctttcagtgcttgggctttactcctgagcatcaacgggacttcattgcccgggatttggggccaacactggccaacagcacccaccacaatgtaagactcctcatgctggatgaccagaggctgctgctccctcattgggccaaggtggtgttgacagacccagaagctgccaaatatgttcatggcatcgctgtccactggtacctggattttttggcccctgcaaaggctactctgggagagacccacagactcttccccaactatatgctgtttgcatcagaagcctgcgtggggagcaaattctgggagcagtctgttaggctgggttcctgggatcggggcatgcaatattcccatagtataataactaacctcctctaccacgtggtaggatggacagactggaatctggctttgaacccagaaggaggccccaattgggtgcgcaactttgttgacagccccatcattgtggatatcacaaaggacgtgttctacaaacagcctatgttctatcatctggggcactttagcaagttcattccagagggttcccagagagtaggcttggttgcctcacagaagaatgatctggatgctgtggcactcatgcatcctgacgggagtgcagtggtggtagtactgaacaggtctagcaaagatgttcccttgactatcaaagacccagctgtgggctttctggaaaccatttcccctggatactctatccacacctatctctggagaagacagtaatga

SEQ ID NO: 172 - protein, 536 aa, synthetic construct
  REGION 1..536: note = Variant of B-Glucocerebrosidase
MEFSSPSREECPKPLSRVSIMAGSLTGLLLLQAVSWASGARPCIPKSFGYSSVVCVCNATYCDSFDPVTFPALGTFSRYESTRSGRRMELSMGPIQANRTGTGLLLTLQPEQKFQKVKGFGGAMTDAAALNILALSPPAQNLLLKSYFSEEGIGYNIIRVPMASCDFSIRTYTYADTPDDFQLHNFSLPEEDTKLKIPLIHRALQLAQRPVSLLASPWTSPTWLKTNGALNGKGSLKGQPGDIYHQTWARYFVKFLDAYAEHKLQFWAVTAENEPSAGLLSGYPFQCLGFTPEHQRDFIARDLGPTLANSTHHNVRLLMLDDQRLLLPHWAKVVLTDPEAAKYVHGIAVHWYLDFLAPAKATLGETHRLFPNYMLFASEACVGSKFWEQSVRLGSWDRGMQYSHSIITNLLYHVVGWTDWNLALNPEGGPNWVRNFVDSPIIVDITKDVFYKQPMFYHLGHFSKFIPEGSQRVGLVASQKNDLDAVALMHPDGSAVVVVLNRSSKDVPLTIKDPAVGFLETISPGYSIHTYLWRRQ

SEQ ID NO: 173 - DNA, 1614 bp, synthetic construct
  misc_feature 1..1614: note = Variant of B-Glucocerebrosidase
  source 1..1614: mol_type = other DNA
atggagttttcttctcctagtagagaagaatgccccaagccactgagcagggtgagcatcatggctggctccctcacagggctgcttcttttgcaggcagtctcatgggcctctggagccaggccctgtattcccaagtcattcggctactcctcagtggtgtgtgtatgcaatgccacctattgtgacagttttgatcctccaactttccctgctctgggtaccttctcccggtatgagagcacaagaagtggaagacgcatggagctctcaatgggcccaatacaggctaaccacactgggacaggtctgctgctgaccctccaacctgaacagaagtttcagaaagtcaagggatttggaggagccatgactgatgcagcagcactcaacatcttgtccctgtctccaccagcccagaatctgctgttgaagtcctacttctcagaggaggggattggctacaacatcatccgggttcccatggctagctgtgacttctccattaggacctatacatacgctgacacccccgatgattttcagctccataatttcagtctccctgaagaagacaccaaactgaagatacctctgattcacagagccttgcaactggcacaaaggccagtgagcctcttggcttctccctggactagtcctacatggctgaagactaatggtgctgttaatgggaaaggctccctgaaaggacagccaggtgacatctatcatcagacatgggcccgctactttgtgaaattccttgatgcctatgcagagcacaagctccagttctgggcagtcaccgcagaaaacgagccctcagctgggctgctgtctggctacccctttcagtgcttgggctttactcctgagcatcaacgggacttcattgcccgggatttggggccaacactggccaacagcacccaccacaatgtaagactcctcatgctggatgaccagaggctgctgctccctcattgggccaaggtggtgttgacagacccagaagctgccaaatatgttcatggcatcgctgtccactggtacctggattttttggcccctgcaaaggctactctgggagagacccacagactcttccccaacaccatgctgtttgcatcagaagcctgcgtggggagcaaattctgggagcagtctgttaggctgggttcctgggatcggggcatgcaatattcccatagtataataactaacctcctctaccacgtggtaggatggacagactggaatctggctttgaacccagaaggaggccccaattgggtgcgcaactttgttgacagccccatcattgtggatatcacaaaggacaccttctacaaacagcctatgttctatcatctggggcactttagcaagttcattccagagggttcccagagagtaggcttggttgcctcacagaagaatgatctggatgctgtggcactcatgcatcctgacgggagtgcagtggtggtagtactgaacaggtctagcaaagatgttcccttgactatcaaagacccagctgtgggctttctggaaaccatttcccctggatactctatccacacctatctctggagaagacagtaatga

SEQ ID NO: 174 - protein, 536 aa, synthetic construct
  REGION 1..536: note = Variant of B-Glucocerebrosidase
MEFSSPSREECPKPLSRVSIMAGSLTGLLLLQAVSWASGARPCIPKSFGYSSVVCVCNATYCDSFDPPTFPALGTFSRYESTRSGRRMELSMGPIQANHTGTGLLLTLQPEQKFQKVKGFGGAMTDAAALNILSLSPPAQNLLLKSYFSEEGIGYNIIRVPMASCDFSIRTYTYADTPDDFQLHNFSLPEEDTKLKIPLIHRALQLAQRPVSLLASPWTSPTWLKTNGAVNGKGSLKGQPGDIYHQTWARYFVKFLDAYAEHKLQFWAVTAENEPSAGLLSGYPFQCLGFTPEHQRDFIARDLGPTLANSTHHNVRLLMLDDQRLLLPHWAKVVLTDPEAAKYVHGIAVHWYLDFLAPAKATLGETHRLFPNTMLFASEACVGSKFWEQSVRLGSWDRGMQYSHSIITNLLYHVVGWTDWNLALNPEGGPNWVRNFVDSPIIVDITKDTFYKQPMFYHLGHFSKFIPEGSQRVGLVASQKNDLDAVALMHPDGSAVVVVLNRSSKDVPLTIKDPAVGFLETISPGYSIHTYLWRRQ

SEQ ID NO: 175 - DNA, 1614 bp, synthetic construct
  misc_feature 1..1614: note = Variant of B-Glucocerebrosidase
  source 1..1614: mol_type = other DNA
atggagttttcttctcctagtagagaagaatgccccaagccactgagcagggtgagcatcatggctggctccctcacagggctgcttcttttgcaggcagtctcatgggcctctggagccaggccctgtattcccaggtcattcggctactcctcagtggtgtgtgtatgcaatgccacctattgtgacagttttgatcctgtcactttccctgctctgggtaccttctcccggtatgagagcacaagaagtggaagacgcatggagctctcaatgggcccaatacaggctaaccacactgggacaggtctgctgctgaccctccaacctgaacagaagtttcagaaagtcaagggatttggaggagccatgactgatgcagcagcactcaacatcttggccctgtctccaccagcccagaatctgctgttgaagtcctacttctcagaggaggggattgagtacaacatcatccgggttcccatggctagctgtgacttctccattaggacctatacatacgctgacacccccgatgattttcagctccataatttcagtctccctgaagaagacaccaaactgaagatacctctgattcacagagccttgcagctggcacaaaggccactgagcctcttggcttctccctggactagtcctacatggctgaagactaatggtgctctgaatgggaaaggctccctgaaaggacagccaggtgacatctatcatcagacatgggcccgctactttgtgaaattccttgatgcctatgcaaaacacaagctccagttctgggcagtcaccgcagaaaacgagccctcagctgggctgctgtctggctacccctttcagtgcttgggctttactcctgagcatcaacgggacttcattgcccgggatttggggccaacactggccaacagcacccaccacaatgtaagactcctcatgctggatgaccagaggctgctgctccctcattgggccaaggtggtgttggctgacccagaagctgccaaatatgttcatggcatcgctgtccactggtacctggattttttggcccctgcaaaggctactctgggagagacccacagactcttccccaacaccatgctgtttgcatcagaagcctgcgtggggagcaaattctgggagcagtctgttaggctgggttcctgggatcggggcatgcaatattcccatagtataataactaacctcctctaccacgtggtaggatggacagactggaatctggctttgaacccagaaggaggccccaattgggtgcgcaactttgttgacagccccatcattgtggatatcacaaaggacacattctacaaacagcctatgttctatcatctggggcactttagcaagttcattccagagggttcccagagagtaggcttggttgcctcacagaagaatgatctggatgctgtggcactcatgcatcctgacgggagtgcagtggtggtagtactgaacaggtctagcaaagatgttcccttgactatcaaagacccagctgtgggctttctggaaaccatttcccctggatactctatccacacctatctctggagaagacagtaatga

SEQ ID NO: 176 - protein, 536 aa, synthetic construct
  REGION 1..536: note = Variant of B-Glucocerebrosidase
MEFSSPSREECPKPLSRVSIMAGSLTGLLLLQAVSWASGARPCIPRSFGYSSVVCVCNATYCDSFDPVTFPALGTFSRYESTRSGRRMELSMGPIQANHTGTGLLLTLQPEQKFQKVKGFGGAMTDAAALNILALSPPAQNLLLKSYFSEEGIEYNIIRVPMASCDFSIRTYTYADTPDDFQLHNFSLPEEDTKLKIPLIHRALQLAQRPLSLLASPWTSPTWLKTNGALNGKGSLKGQPGDIYHQTWARYFVKFLDAYAKHKLQFWAVTAENEPSAGLLSGYPFQCLGFTPEHQRDFIARDLGPTLANSTHHNVRLLMLDDQRLLLPHWAKVVLADPEAAKYVHGIAVHWYLDFLAPAKATLGETHRLFPNTMLFASEACVGSKFWEQSVRLGSWDRGMQYSHSIITNLLYHVVGWTDWNLALNPEGGPNWVRNFVDSPIIVDITKDTFYKQPMFYHLGHFSKFIPEGSQRVGLVASQKNDLDAVALMHPDGSAVVVVLNRSSKDVPLTIKDPAVGFLETISPGYSIHTYLWRRQ

SEQ ID NO: 177 - DNA, 1614 bp, synthetic construct
  misc_feature 1..1614: note = Variant of B-Glucocerebrosidase
  source 1..1614: mol_type = other DNA
atggagttttcttctcctagtagagaagaatgccccaagccactgagcagggtgagcatcatggctggctccctcacagggctgcttcttttgcaggcagtctcatgggcctctggagccaggccctgtattcccaagtcattcggctactcctcagtggtgtgtgtatgcaatgccacctattgtgacagttttgatcctgtcactttccctgctctgggtaccttctcccggtatgagagcacaagaagtggaagacgcatggagctctcaatgggcccaatacaggctaaccgcactgggacaggtctgctgctgaccctccaacctgaacagaagtttcagaaagtcaagggatttggaggagccatgactgatgcagcagcactcaacatcttggccctgtctccaccagcccagaatctgctgttgaagtcctacttctcagaggaggggattgagtacaacatcatccgggttcccatggctagctgtgacttctccattaggacctatacatacgctgacacccccgatgattttcagctccataatttcagtctccctgaagaagacaccaaactgaagatacctctgattcacagagccttgcagctggcacaaaggccagtgagcctcttggcttctccctggactagtcctacatggctgaagactaatggtgctgtgaatgggaaaggctccctgaaaggacagccaggtgacatctatcatcagacatgggcccgctactttgtgaaattccttgatgcctatgcaaaacacaagctccagttctgggcagtcaccgcagaaaacgagccctcagctgggctgctgtctggctacccctttcagtgcttgggctttactcctgagcatcaacgggacttcattgcccgggatttggggccaacactggccaacagcacccaccacaatgtaagactcctcatgctggatgaccagaggctgctgctccctcattgggccaaggtggtgttggctgacccagaagctgccaaatatgttcatggcatcgctgtccactggtacctggattttttggcccctgcaaaggctactctgggagagacccacagactcttccccaacaccatgctgtttgcatcagaagcctgcgtggggagcaaattctgggagcagtctgttaggctgggttcctgggatcggggcatgcaatattcccatagtataataactaacctcctctaccacgtggtaggatggacagactggaatctggctttgaacccagaaggaggccccaattgggtgcgcaactttgttgacagccccatcattgtggatatcacaaaggacaccttctacaaacagcctatgttctatcatctggggcactttagcaagttcattccagagggttcccagagagtaggcttggttgcctcacagaagaatgatctggatgctgtggcactcatgcatcctgacgggagtgcagtggtggtagtactgaacaggtctagcaaagatgttcccttgactatcaaagacccagctgtgggctttctggaaaccatttcccctggatactctatccacacctatctctggagaagacagtaatga

SEQ ID NO: 178 - protein, 536 aa, synthetic construct
  REGION 1..536: note = Variant of B-Glucocerebrosidase
MEFSSPSREECPKPLSRVSIMAGSLTGLLLLQAVSWASGARPCIPKSFGYSSVVCVCNATYCDSFDPVTFPALGTFSRYESTRSGRRMELSMGPIQANRTGTGLLLTLQPEQKFQKVKGFGGAMTDAAALNILALSPPAQNLLLKSYFSEEGIEYNIIRVPMASCDFSIRTYTYADTPDDFQLHNFSLPEEDTKLKIPLIHRALQLAQRPVSLLASPWTSPTWLKTNGAVNGKGSLKGQPGDIYHQTWARYFVKFLDAYAKHKLQFWAVTAENEPSAGLLSGYPFQCLGFTPEHQRDFIARDLGPTLANSTHHNVRLLMLDDQRLLLPHWAKVVLADPEAAKYVHGIAVHWYLDFLAPAKATLGETHRLFPNTMLFASEACVGSKFWEQSVRLGSWDRGMQYSHSIITNLLYHVVGWTDWNLALNPEGGPNWVRNFVDSPIIVDITKDTFYKQPMFYHLGHFSKFIPEGSQRVGLVASQKNDLDAVALMHPDGSAVVVVLNRSSKDVPLTIKDPAVGFLETISPGYSIHTYLWRRQ

SEQ ID NO: 179 - DNA, 1614 bp, synthetic construct
  misc_feature 1..1614: note = Variant of B-Glucocerebrosidase
  source 1..1614: mol_type = other DNA
atggagttttcttctcctagtagagaagaatgccccaagccactgagcagggtgagcatcatggctggctccctcacagggctgcttcttttgcaggcagtctcatgggcctctggagccaggccctgtattcccaagtcattcggctactcctcagtggtgtgtgtatgcaatgccacctattgtgacagttttgatcctccaactttccctgctctgggtaccttctcccggtatgagagcacaagaagtggaagacgcatggagctctcaatgggcccaatacaggctaaccacactgggacaggtctgctgctgaccctccaacctgaacagaagtttcagaaagtcaagggatttggaggagccatgactgatgcagcagcactcaacatcttggccctgtctccaccagcccagaatctgctgttgaagtcctacttctcagaggaggggattgggtacaacatcatccgggttcccatggctagctgtgacttctccattaggacctatacatacgctgacacccccgatgattttcagctccataatttcagtctccctgaagaagacaccaaactgaagatacctctgattcacagagccttgcagctggcacaaaggccagtgagcctcttggcttctccctggactagtcctacatggctgaagactaatggtgctctgaatgggaaaggctccctgaaaggacagccaggtgacatctatcatcagacatgggcccgctactttgtgaaattccttgatgcctatgcagagcacaagctccagttctgggcagtcaccgcagaaaacgagccctcagctgggctgctgtctggctacccctttcagtgcttgggctttactcctgagcatcaacgggacttcattgcccgggatttggggccaacactggccaacagcacccaccacaatgtaagactcctcatgctggatgaccagaggctgctgctccctcattgggccaaggtggtgttgacagacccagaagctgccaaatatgttcatggcatcgctgtccactggtacctggattttttggcccctgcaaaggctactctgggagagacccacagactcttccccaacaccatgctgtttgcatcagaagcctgcgtggggagcaaattctgggagcagtctgttaggctgggttcctgggatcggggcatgcaatattcccatagtataataactaacctcctctaccacgtggtaggatggacagactggaatctggctttgaacccagaaggaggccccaattgggtgcgcaactttgttgacagccccatcattgtggatatcacaaaggacgtgttctacaaacagcctatgttctatcatctggggcactttagcaagttcattccagagggttcccagagagtaggcttggttgcctcacagaagaatgatctggatgctgtggcactcatgcatcctgacgggagtgcagtggtggtagtactgaacaggtctagcaaagatgttcccttgactatcaaagacccagctgtgggctttctggaaaccatttcccctggatactctatccacacctatctctggagaagacagtaatga

SEQ ID NO: 180 - protein, 536 aa, synthetic construct
  REGION 1..536: note = Variant of B-Glucocerebrosidase
MEFSSPSREECPKPLSRVSIMAGSLTGLLLLQAVSWASGARPCIPKSFGYSSVVCVCNATYCDSFDPPTFPALGTFSRYESTRSGRRMELSMGPIQANHTGTGLLLTLQPEQKFQKVKGFGGAMTDAAALNILALSPPAQNLLLKSYFSEEGIGYNIIRVPMASCDFSIRTYTYADTPDDFQLHNFSLPEEDTKLKIPLIHRALQLAQRPVSLLASPWTSPTWLKTNGALNGKGSLKGQPGDIYHQTWARYFVKFLDAYAEHKLQFWAVTAENEPSAGLLSGYPFQCLGFTPEHQRDFIARDLGPTLANSTHHNVRLLMLDDQRLLLPHWAKVVLTDPEAAKYVHGIAVHWYLDFLAPAKATLGETHRLFPNTMLFASEACVGSKFWEQSVRLGSWDRGMQYSHSIITNLLYHVVGWTDWNLALNPEGGPNWVRNFVDSPIIVDITKDVFYKQPMFYHLGHFSKFIPEGSQRVGLVASQKNDLDAVALMHPDGSAVVVVLNRSSKDVPLTIKDPAVGFLETISPGYSIHTYLWRRQ

SEQ ID NO: 181 - DNA, 1614 bp, synthetic construct
  misc_feature 1..1614: note = Variant of B-Glucocerebrosidase
  source 1..1614: mol_type = other DNA
atggagttttcttctcctagtagagaagaatgccccaagccactgagcagggtgagcatcatggctggctccctcacagggctgcttcttttgcaggcagtctcatgggcctctggagccaggccctgtattcccaggtcattcggctactcctcagtggtgtgtgtatgcaatgccacctattgtgacagttttgatcctctcactttccctgctctgggtaccttctcccggtatgagagcacaagaagtggaagacgcatggagctctcaatgggcccaatacaggctaaccacactgggacaggtctgctgctgaccctccaacctgaacagaagtttcagaaagtcaagggatttggaggagccatgactgatgcagcagcactcaacatcttggccctgtctccaccagcccagaatctgctgttgaagtcctacttctcagaggaggggattggctacaacatcatccgggttcccatggctagctgtgacttctccattaggacctatacatacgctgacacccccgatgattttcagctccataatttcagtctccctgaagaagacaccaaactgaagatacctctgattcacagagccttgcagctggcacaaaggccagtgagcctcttggcttctccctggactagtcctacatggctgaagactaatggtgctgttaatgggaaaggctccctgaaaggacagccaggtgacatctatcatcagacatgggcccgctactttgtgaaattccttgatgcctatgcagaacacaagctccagttctgggcagtcaccgcagaaaacgagccctcagctgggctgctgtctggctacccctttcagtgcttgggctttactcctgagcatcaacgggacttcattgcccgggatttggggccaacactggccaacagcacccaccacgatgtaagactcctcatgctggatgaccagaggctgctgctccctcattgggccaaggtggtgttgacagacccagaagctgccaaatatgttcatggcatcgctgtccactggtacctggattttttggcccctgcaaaggctactctgggagagacccacagactcttccccaacaccatgctgtttgcatcagaagcctgcgtggggagcaaattctgggagcagtctgttaggctgggttcctgggatcggggcatgcaatattcccatagtataataactaacctcctctaccacgtggtaggatggacagactggaatctggctttgaacccagaaggaggccccaattgggtgcgcaactttgttgacagccccatcattgtggatatcacaaaggacaccttctacaaacagcctatgttctatcatctggggcactttagcaagttcattccagagggttcccagagagtaggcttggttgcctcacagaagaatgatctggatgctgtggcactcatgcatcctgacgggagtgcagtggtggtagtactgaacaggtctagcaaagatgttcccttgactatcaaagacccagctgtgggctttctggaaaccatttcccctggatactctatccacacctatctctggagaagacagtaatga

SEQ ID NO: 182 - protein, 536 aa, synthetic construct
  REGION 1..536: note = Variant of B-Glucocerebrosidase
MEFSSPSREECPKPLSRVSIMAGSLTGLLLLQAVSWASGARPCIPRSFGYSSVVCVCNATYCDSFDPLTFPALGTFSRYESTRSGRRMELSMGPIQANHTGTGLLLTLQPEQKFQKVKGFGGAMTDAAALNILALSPPAQNLLLKSYFSEEGIGYNIIRVPMASCDFSIRTYTYADTPDDFQLHNFSLPEEDTKLKIPLIHRALQLAQRPVSLLASPWTSPTWLKTNGAVNGKGSLKGQPGDIYHQTWARYFVKFLDAYAEHKLQFWAVTAENEPSAGLLSGYPFQCLGFTPEHQRDFIARDLGPTLANSTHHDVRLLMLDDQRLLLPHWAKVVLTDPEAAKYVHGIAVHWYLDFLAPAKATLGETHRLFPNTMLFASEACVGSKFWEQSVRLGSWDRGMQYSHSIITNLLYHVVGWTDWNLALNPEGGPNWVRNFVDSPIIVDITKDTFYKQPMFYHLGHFSKFIPEGSQRVGLVASQKNDLDAVALMHPDGSAVVVVLNRSSKDVPLTIKDPAVGFLETISPGYSIHTYLWRRQ

SEQ ID NO: 183 - DNA, 1614 bp, synthetic construct
  misc_feature 1..1614: note = Variant of B-Glucocerebrosidase
  source 1..1614: mol_type = other DNA
atggagttttcttctcctagtagagaagaatgccccaagccactgagcagggtgagcatcatggctggctccctcacagggctgcttcttttgcaggcagtctcatgggcctctggagccaggccctgtattcccaagtcattcggctactcctcagtggtgtgtgtatgcaatgccacctattgtgacagttttgatcctccaactttccctgctctgggtaccttctcccggtatgagagcacaagaagtggaagacgcatggagctctcaatgggcccaatacaggctaaccacactgggacaggtctgctgctgaccctccaacctgaacagaagtttcagaaagtcaagggatttggaggagccatgactgatgcagcagcactcaacatcttggccctgtctccaccagcccagaatctgctgttgaagtcctacttctcagaggaggggattgagtacaacatcatccgggttcccatggctagctgtgacttctccattaggacctatacatacgctgacacccccgatgattttcagctccataatttcagtctccctgaagaagacaccaaactgaagatacctctgattcacagagccttgcagctggcacaaaggccagtgagcctcttggcttctccctggactagtcctacatggctgaagactaatggtgctgtgaatgggaaaggctccctgaaaggacagccaggtgacatctatcatcagacatgggcccgctactttgtgaaattccttgatgcctatgcagaacacaagctccagttctgggcagtcaccgcagaaaacgagccctcagctgggctgctgtctggctacccctttcagtgcttgggctttactcctgagcatcaacgggacttcattgcccgggatttggggccaacactggccaacagcacccaccacaatgtaagactcctcatgctggatgaccagaggctgctgctccctcattgggccaaggtggtgttgactgacccagaagctgccaaatatgttcatggcatcgctgtccactggtacctggattttttggcccctgcaaaggctactctgggagagacccacagactcttccccaacaccatgctgtttgcatcagaagcctgcgtggggagcaaattctgggagcagtctgttaggctgggttcctgggatcggggcatgcaatattcccatagtataataactaacctcctctaccacgtggtaggatggacagactggaatctggctttgaacccagaaggaggccccaattgggtgcgcaactttgttgacagccccatcattgtggatatcacaaaggacaccttctacaaacagcctatgttctatcatctggggcactttagcaagttcattccagagggttcccagagagtaggcttggttgcctcacagaagaatgatctggatgctgtggcactcatgcatcctgacgggagtgcagtggtggtagtactgaacaggtctagcaaagatgttcccttgactatcaaagacccagctgtgggctttctggaaaccatttcccctggatactctatccacacctatctctggagaagacagtaatga

SEQ ID NO: 184 - protein, 536 aa, synthetic construct
  REGION 1..536: note = Variant of B-Glucocerebrosidase
MEFSSPSREECPKPLSRVSIMAGSLTGLLLLQAVSWASGARPCIPKSFGYSSVVCVCNATYCDSFDPPTFPALGTFSRYESTRSGRRMELSMGPIQANHTGTGLLLTLQPEQKFQKVKGFGGAMTDAAALNILALSPPAQNLLLKSYFSEEGIEYNIIRVPMASCDFSIRTYTYADTPDDFQLHNFSLPEEDTKLKIPLIHRALQLAQRPVSLLASPWTSPTWLKTNGAVNGKGSLKGQPGDIYHQTWARYFVKFLDAYAEHKLQFWAVTAENEPSAGLLSGYPFQCLGFTPEHQRDFIARDLGPTLANSTHHNVRLLMLDDQRLLLPHWAKVVLTDPEAAKYVHGIAVHWYLDFLAPAKATLGETHRLFPNTMLFASEACVGSKFWEQSVRLGSWDRGMQYSHSIITNLLYHVVGWTDWNLALNPEGGPNWVRNFVDSPIIVDITKDTFYKQPMFYHLGHFSKFIPEGSQRVGLVASQKNDLDAVALMHPDGSAVVVVLNRSSKDVPLTIKDPAVGFLETISPGYSIHTYLWRRQ

SEQ ID NO: 185 - DNA, 1614 bp, synthetic construct
  misc_feature 1..1614: note = Variant of B-Glucocerebrosidase
  source 1..1614: mol_type = other DNA
atggagttttcttctcctagtagagaagaatgccccaagccactgagcagggtgagcatcatggctggctccctcacagggctgcttcttttgcaggcagtctcatgggcctctggagccaggccctgtattcccaagtcattcggctactcctcagtggtgtgtgtatgcaatgccacctattgtgacagttttgatcctctcactttccctgctctgggtaccttctcccggtatgagagcacaagaagtggaagacgcatggagctctcaatgggcccaatacaggctaaccacactgggacaggtctgctgctgaccctccaacctgaacagaagtttcagaaagtcaagggatttggaggagccatgactgatgcagcagcactcaacatcttggccctgtctccaccagcccagaatctgctgttgaagtcctacttctcagaggaggggattggctacaacatcatccgggttcccatggctagctgtgacttctccattaggacctatacatacgctgacacccccgatgattttcagctccataatttcagtctccctgaagaagacaccaaactgaagatacctctgattcacagagccttgcaactggcacaaaggccagtgagcctcttggcttctccctggactagtcctacatggctgaagactaatggtgctgttaatgggaaaggctccctgaaaggacagccaggtgacatctatcatcagacatgggcccgctactttgtgaaattccttgatgcctatgcagagcacaagctccagttctgggcagtcaccgcagaaaacgagccctcagctgggctgctgtctggctacccctttcagtgcttgggctttactcctgagcatcaacgggacttcattgcccgggatttggggccaacactggccaacagcacccaccacaatgtaagactcctcatgctggatgaccagaggctgctgctccctcattgggccaaggtggtgttgacagacccagaagctgccaaatatgttcatggcatcgctgtccactggtacctggattttttggcccctgcaaaggctactctgggagagacccacagactcttccccaacaccatgctgtttgcatcagaagcctgcgtggggagcaaattctgggagcagtctgttaggctgggttcctgggatcggggcatgcaatattcccatagtataataactaacctcctctaccacgtggtaggatggacagactggaatctggctttgaacccagaaggaggccccaattgggtgcgcaactttgttgacagccccatcattgtggatatcacaaaggacgtgttctacaaacagcctatgttctatcatctggggcactttagcaagttcattccagagggttcccagagagtaggcttggttgcctcacagaagaatgatctggatgctgtggcactcatgcatcctgacgggagtgcagtggtggtagtactgaacaggtctagcaaagatgttcccttgactatcaaagacccagctgtgggctttctggaaaccatttcccctggatactctatccacacctatctctggagaagacagtaatga

SEQ ID NO: 186 - protein, 536 aa, synthetic construct
  REGION 1..536: note = Variant of B-Glucocerebrosidase
MEFSSPSREECPKPLSRVSIMAGSLTGLLLLQAVSWASGARPCIPKSFGYSSVVCVCNATYCDSFDPLTFPALGTFSRYESTRSGRRMELSMGPIQANHTGTGLLLTLQPEQKFQKVKGFGGAMTDAAALNILALSPPAQNLLLKSYFSEEGIGYNIIRVPMASCDFSIRTYTYADTPDDFQLHNFSLPEEDTKLKIPLIHRALQLAQRPVSLLASPWTSPTWLKTNGAVNGKGSLKGQPGDIYHQTWARYFVKFLDAYAEHKLQFWAVTAENEPSAGLLSGYPFQCLGFTPEHQRDFIARDLGPTLANSTHHNVRLLMLDDQRLLLPHWAKVVLTDPEAAKYVHGIAVHWYLDFLAPAKATLGETHRLFPNTMLFASEACVGSKFWEQSVRLGSWDRGMQYSHSIITNLLYHVVGWTDWNLALNPEGGPNWVRNFVDSPIIVDITKDVFYKQPMFYHLGHFSKFIPEGSQRVGLVASQKNDLDAVALMHPDGSAVVVVLNRSSKDVPLTIKDPAVGFLETISPGYSIHTYLWRRQ

SEQ ID NO: 187 - DNA, 1614 bp, synthetic construct
  misc_feature 1..1614: note = Variant of B-Glucocerebrosidase
  source 1..1614: mol_type = other DNA
atggagttttcttctcctagtagagaagaatgccccaagccactgagcagggtgagcatcatggctggctccctcacagggctgcttcttttgcaggcagtctcatgggcctctggagccaggccctgtattcccaagtcattcggctactcctcagtggtgtgtgtatgcaatgccacctattgtgacagttttgatcctcccactttccctgctctgggtaccttctcccggtatgagagcacaagaagtggaagacgcatggagctctcaatgggcccaatacaggctaaccgcactgggacaggtctgctgctgaccctccaacctgaacagaagtttcagaaagtcaagggatttggaggagccatgactgatgcagcagcactcaacatcttggccctgtctccaccagcccagaatctgctgttgaagtcctacttctcagaggaggggattggctacaacatcatccgggttcccatggctagctgtgacttctccattaggacctatacatacgctgacacccccgatgattttcagctccataatttcagtctccctgaagaagacaccaaactgaagatacctctgattcacagagccttgcaactggcacaaaggccagtgagcctcttggcttctccctggactagtcctacatggctgaagactaatggtgctgttaatgggaaaggctccctgaaaggacagccaggtgacatctatcatcagacatgggcccgctactttgtgaaattccttgatgcctatgcagagcacaagctccagttctgggcagtcaccgcagaaaacgagccctcagctgggctgctgtctggctacccctttcagtgcttgggctttactcctgagcatcaacgggacttcattgcccgggatttggggccaacactggccaacagcacccaccacaatgtaagactcctcatgctggatgaccagaggctgctgctccctcattgggccaaggtggtgttgacagacccagaagctgccaaatatgttcatggcatcgctgtccactggtacctggattttttggcccctgcaaaggctactctgggagagacccacagactcttccccaacaccatgctgtttgcatcagaagcctgcgtggggagcaaattctgggagcagtctgttaggctgggttcctgggatcggggcatgcaatattcccatagtataataactaacctcctctaccacgtggtaggatggacagactggaatctggctttgaacccagaaggaggccccaattgggtgcgcaactttgttgacagccccatcattgtggatatcacaaaggacgtgttctacaaacagcctatgttctatcatctggggcactttagcaagttcattccagagggttcccagagagtaggcttggttgcctcacagaagaatgatctggatgctgtggcactcatgcatcctgacgggagtgcagtggtggtagtactgaacaggtctagcaaagatgttcccttgactatcaaagacccagctgtgggctttctggaaaccatttcccctggatactctatccacacctatctctggagaagacagtaatga

SEQ ID NO: 188 - protein, 536 aa, synthetic construct
  REGION 1..536: note = Variant of B-Glucocerebrosidase
MEFSSPSREECPKPLSRVSIMAGSLTGLLLLQAVSWASGARPCIPKSFGYSSVVCVCNATYCDSFDPPTFPALGTFSRYESTRSGRRMELSMGPIQANRTGTGLLLTLQPEQKFQKVKGFGGAMTDAAALNILALSPPAQNLLLKSYFSEEGIGYNIIRVPMASCDFSIRTYTYADTPDDFQLHNFSLPEEDTKLKIPLIHRALQLAQRPVSLLASPWTSPTWLKTNGAVNGKGSLKGQPGDIYHQTWARYFVKFLDAYAEHKLQFWAVTAENEPSAGLLSGYPFQCLGFTPEHQRDFIARDLGPTLANSTHHNVRLLMLDDQRLLLPHWAKVVLTDPEAAKYVHGIAVHWYLDFLAPAKATLGETHRLFPNTMLFASEACVGSKFWEQSVRLGSWDRGMQYSHSIITNLLYHVVGWTDWNLALNPEGGPNWVRNFVDSPIIVDITKDVFYKQPMFYHLGHFSKFIPEGSQRVGLVASQKNDLDAVALMHPDGSAVVVVLNRSSKDVPLTIKDPAVGFLETISPGYSIHTYLWRRQ

SEQ ID NO: 189 - DNA, 1614 bp, synthetic construct
  misc_feature 1..1614: note = Variant of B-Glucocerebrosidase
  source 1..1614: mol_type = other DNA
atggagttttcttctcctagtagagaagaatgccccaagccactgagcagggtgagcatcatggctggctccctcacagggctgcttcttttgcaggcagtctcatgggcctctggagccaggccctgtattcccaagtcattcggctactcctcagtggtgtgtgtatgcaatgccacctattgtgacagttttgatcctgtcactttccctgctctgggtaccttctcccggtatgagagcacaagaagtggaagacgcatggagctctcaatgggcccaatacaggctaaccacactgggacaggtctgctgctgaccctccaacctgaacagaagtttcagaaagtcaagggatttggaggagccatgactgatgcagcagcactcaacatcttggccctgtctccaccagcccagaatctgctgttgaagtcctacttctcagaggaggggattgagtacaacatcatccgggttcccatggctagctgtgacttctccattaggacctatacatacgctgacacccccgatgattttcagctccataatttcagtctccctgaagaagacaccaaactgaagatacctctgattcacagagccttgcagctggcacaaaggccagtgagcctcttggcttctccctggactagtcctacatggctgaagactaatggtgctctgaatgggaaaggctccctgaaaggacagccaggtgacatctatcatcagacatgggcccgctactttgtgaaattccttgatgcctatgcagaacacaagctccagttctgggcagtcaccgcagaaaacgagccctcagctgggctgctgtctggctacccctttcagtgcttgggctttactcctgagcatcaacgggacttcattgcccgggatttggggccaacactggccaacagcacccaccacgatgtaagactcctcatgctggatgaccagaggctgctgctccctcattgggccaaggtggtgttggctgacccagaagctgccaaatatgttcatggcatcgctgtccactggtacctggattttttggcccctgcaaaggctactctgggagagacccacagactcttccccaacaccatgctgtttgcatcagaagcctgcgtggggagcaaattctgggagcagtctgttaggctgggttcctgggatcggggcatgcaatattcccatagtataataactaacctcctctaccacgtggtaggatggacagactggaatctggctttgaacccagaaggaggccccaattgggtgcgcaactttgttgacagccccatcattgtggatatcacaaaggacgtgttctacaaacagcctatgttctatcatctggggcactttagcaagttcattccagagggttcccagagagtaggcttggttgcctcacagaagaatgatctggatgctgtggcactcatgcatcctgacgggagtgcagtggtggtagtactgaacaggtctagcaaagatgttcccttgactatcaaagacccagctgtgggctttctggaaaccatttcccctggatactctatccacacctatctctggagaagacagtaatga

SEQ ID NO: 190 - protein, 536 aa, synthetic construct
  REGION 1..536: note = Variant of B-Glucocerebrosidase
MEFSSPSREECPKPLSRVSIMAGSLTGLLLLQAVSWASGARPCIPKSFGYSSVVCVCNATYCDSFDPVTFPALGTFSRYESTRSGRRMELSMGPIQANHTGTGLLLTLQPEQKFQKVKGFGGAMTDAAALNILALSPPAQNLLLKSYFSEEGIEYNIIRVPMASCDFSIRTYTYADTPDDFQLHNFSLPEEDTKLKIPLIHRALQLAQRPVSLLASPWTSPTWLKTNGALNGKGSLKGQPGDIYHQTWARYFVKFLDAYAEHKLQFWAVTAENEPSAGLLSGYPFQCLGFTPEHQRDFIARDLGPTLANSTHHDVRLLMLDDQRLLLPHWAKVVLADPEAAKYVHGIAVHWYLDFLAPAKATLGETHRLFPNTMLFASEACVGSKFWEQSVRLGSWDRGMQYSHSIITNLLYHVVGWTDWNLALNPEGGPNWVRNFVDSPIIVDITKDVFYKQPMFYHLGHFSKFIPEGSQRVGLVASQKNDLDAVALMHPDGSAVVVVLNRSSKDVPLTIKDPAVGFLETISPGYSIHTYLWRRQ

SEQ ID NO: 191 - DNA, 1614 bp, synthetic construct
  misc_feature 1..1614: note = Variant of B-Glucocerebrosidase
  source 1..1614: mol_type = other DNA
atggagttttcttctcctagtagagaagaatgccccaagccactgagcagggtgagcatcatggctggctccctcacagggctgcttcttttgcaggcagtctcatgggcctctggagccaggccctgtattcccaggtcattcggctactcctcagtggtgtgtgtatgcaatgccacctattgtgacagttttgatcctgtcactttccctgctctgggtaccttctcccggtatgagagcacaagaagtggaagacgcatggagctctcaatgggcccaatacaggctaaccacactgggacaggtctgctgctgaccctccaacctgaacagaagtttcagaaagtcaagggatttggaggagccatgactgatgcagcagcactcaacatcttggccctgtctccaccagcccagaatctgctgttgaagtcctacttctcagaggaggggattgagtacaacatcatccgggttcccatggctagctgtgacttctccattaggacctatacatacgctgacacccccgatgattttcagctccataatttcagtctccctgaagaagacaccaaactgaagatacctctgattcacagagccttgcaactggcacaaaggccagtgagcctcttggcttctccctggactagtcctacatggctgaagactaatggtgctgtgaatgggaaaggctccctgaaaggacagccaggtgacatctatcatcagacatgggcccgctactttgtgaaattccttgatgcctatgcagaacacaagctccagttctgggcagtcaccgcagaaaacgagccctcagctgggctgctgtctggctacccctttcagtgcttgggctttactcctgagcatcaacgggacttcattgcccgggatttggggccaacactggccaacagcacccaccacgatgtaagactcctcatgctggatgaccagaggctgctgctccctcattgggccaaggtggtgttggctgacccagaagctgccaaatatgttcatggcatcgctgtccactggtacctggattttttggcccctgcaaaggctactctgggagagacccacagactcttccccaactatatgctgtttgcatcagaagcctgcgtggggagcaaattctgggagcagtctgttaggctgggttcctgggatcggggcatgcaatattcccatagtataataactaacctcctctaccacgtggtaggatggacagactggaatctggctttgaacccagaaggaggccccaattgggtgcgcaactttgttgacagccccatcattgtggatatcacaaaggacacattctacaaacagcctatgttctatcatctggggcactttagcaagttcattccagagggttcccagagagtaggcttggttgcctcacagaagaatgatctggatgctgtggcactcatgcatcctgacgggagtgcagtggtggtagtactgaacaggtctagcaaagatgttcccttgactatcaaagacccagctgtgggctttctggaaaccatttcccctggatactctatccacacctatctctggagaagacagtaatga

SEQ ID NO: 192 - protein, 536 aa, synthetic construct
  REGION 1..536: note = Variant of B-Glucocerebrosidase
MEFSSPSREECPKPLSRVSIMAGSLTGLLLLQAVSWASGARPCIPRSFGYSSVVCVCNATYCDSFDPVTFPALGTFSRYESTRSGRRMELSMGPIQANHTGTGLLLTLQPEQKFQKVKGFGGAMTDAAALNILALSPPAQNLLLKSYFSEEGIEYNIIRVPMASCDFSIRTYTYADTPDDFQLHNFSLPEEDTKLKIPLIHRALQLAQRPVSLLASPWTSPTWLKTNGAVNGKGSLKGQPGDIYHQTWARYFVKFLDAYAEHKLQFWAVTAENEPSAGLLSGYPFQCLGFTPEHQRDFIARDLGPTLANSTHHDVRLLMLDDQRLLLPHWAKVVLADPEAAKYVHGIAVHWYLDFLAPAKATLGETHRLFPNYMLFASEACVGSKFWEQSVRLGSWDRGMQYSHSIITNLLYHVVGWTDWNLALNPEGGPNWVRNFVDSPIIVDITKDTFYKQPMFYHLGHFSKFIPEGSQRVGLVASQKNDLDAVALMHPDGSAVVVVLNRSSKDVPLTIKDPAVGFLETISPGYSIHTYLWRRQ

SEQ ID NO: 193 - DNA, 1614 bp, synthetic construct
  misc_feature 1..1614: note = Variant of B-Glucocerebrosidase
  source 1..1614: mol_type = other DNA
atggagttttcttctcctagtagagaagaatgccccaagccactgagcagggtgagcatcatggctggctccctcacagggctgcttcttttgcaggcagtctcatgggcctctggagccaggccctgtattcccaggtcattcggctactcctcagtggtgtgtgtatgcaatgccacctattgtgacagttttgatcctccaactttccctgctctgggtaccttctcccggtatgagagcacaagaagtggaagacgcatggagctctcaatgggcccaatacaggctaaccacactgggacaggtctgctgctgaccctccaacctgaacagaagtttcagaaagtcaagggatttggaggagccatgactgatgcagcagcactcaacatcttggccctgtctccaccagcccagaatctgctgttgaagtcctacttctcagaggaggggattgggtacaacatcatccgggttcccatggctagctgtgacttctccattaggacctatacatacgctgacacccccgatgattttcagctccataatttcagtctccctgaagaagacaccaaactgaagatacctctgattcacagagccttgcaactggcacaaaggccagtgagcctcttggcttctccctggactagtcctacatggctgaagactaatggtgctctgaatgggaaaggctccctgaaaggacagccaggtgacatctatcatcagacatgggcccgctactttgtgaaattccttgatgcctatgcagaacacaagctccagttctgggcagtcaccgcagaaaacgagccctcagctgggctgctgtctggctacccctttcagtgcttgggctttactcctgagcatcaacgggacttcattgcccgggatttggggccaacactggccaacagcacccaccacaatgtaagactcctcatgctggatgaccagaggctgctgctccctcattgggccaaggtggtgttgacagacccagaagctgccaaatatgttcatggcatcgctgtccactggtacctggattttttggcccctgcaaaggctactctgggagagacccacagactcttccccaacaccatgctgtttgcatcagaagcctgcgtggggagcaaattctgggagcagtctgttaggctgggttcctgggatcggggcatgcaatattcccatagtataataactaacctcctctaccacgtggtaggatggacagactggaatctggctttgaacccagaaggaggccccaattgggtgcgcaactttgttgacagccccatcattgtggatatcacaaaggacaccttctacaaacagcctatgttctatcatctggggcactttagcaagttcattccagagggttcccagagagtaggcttggttgcctcacagaagaatgatctggatgctgtggcactcatgcatcctgacgggagtgcagtggtggtagtactgaacaggtctagcaaagatgttcccttgactatcaaagacccagctgtgggctttctggaaaccatttcccctggatactctatccacacctatctctggagaagacagtaatga

SEQ ID NO: 194 - protein, 536 aa, synthetic construct
  REGION 1..536: note = Variant of B-Glucocerebrosidase
MEFSSPSREECPKPLSRVSIMAGSLTGLLLLQAVSWASGARPCIPRSFGYSSVVCVCNATYCDSFDPPTFPALGTFSRYESTRSGRRMELSMGPIQANHTGTGLLLTLQPEQKFQKVKGFGGAMTDAAALNILALSPPAQNLLLKSYFSEEGIGYNIIRVPMASCDFSIRTYTYADTPDDFQLHNFSLPEEDTKLKIPLIHRALQLAQRPVSLLASPWTSPTWLKTNGALNGKGSLKGQPGDIYHQTWARYFVKFLDAYAEHKLQFWAVTAENEPSAGLLSGYPFQCLGFTPEHQRDFIARDLGPTLANSTHHNVRLLMLDDQRLLLPHWAKVVLTDPEAAKYVHGIAVHWYLDFLAPAKATLGETHRLFPNTMLFASEACVGSKFWEQSVRLGSWDRGMQYSHSIITNLLYHVVGWTDWNLALNPEGGPNWVRNFVDSPIIVDITKDTFYKQPMFYHLGHFSKFIPEGSQRVGLVASQKNDLDAVALMHPDGSAVVVVLNRSSKDVPLTIKDPAVGFLETISPGYSIHTYLWRRQ

SEQ ID NO: 195 - DNA, 1614 bp, synthetic construct
  misc_feature 1..1614: note = Variant of B-Glucocerebrosidase
  source 1..1614: mol_type = other DNA
atggagttttcttctcctagtagagaagaatgccccaagccactgagcagggtgagcatcatggctggctccctcacagggctgcttcttttgcaggcagtctcatgggcctctggagccaggccctgtattcccaagtcattcggctactcctcagtggtgtgtgtatgcaatgccacctattgtgacagttttgatcctccaactttccctgctctgggtaccttctcccggtatgagagcacaagaagtggaagacgcatggagctctcaatgggcccaatacaggctaaccacactgggacaggtctgctgctgaccctccaacctgaacagaagtttcagaaagtcaagggatttggaggagccatgactgatgcagcagcactcaacatcttggccctgtctccaccagcccagaatctgctgttgaagtcctacttctcagaggaggggattggctacaacatcatccgggttcccatggctagctgtgacttctccattaggacctatacatacgctgacacccccgatgattttcagctccataatttcagtctccctgaagaagacaccaaactgaagatacctctgattcacagagccttgcaactggcacaaaggccagtgagcctcttggcttctccctggactagtcctacatggctgaagactaatggtgctgttaatgggaaaggctccctgaaaggacagccaggtgacatctatcatcagacatgggcccgctactttgtgaaattccttgatgcctatgcagagcacaagctccagttctgggcagtcaccgcagaaaacgagccctcagctgggctgctgtctggctacccctttcagtgcttgggctttactcctgagcatcaacgggacttcattgcccgggatttggggccaacactggccaacagcacccaccacaatgtaagactcctcatgctggatgaccagaggctgctgctccctcattgggccaaggtggtgttggctgacccagaagctgccaaatatgttcatggcatcgctgtccactggtacctggattttttggcccctgcaaaggctactctgggagagacccacagactcttccccaacaccatgctgtttgcatcagaagcctgcgtggggagcaaattctgggagcagtctgttaggctgggttcctgggatcggggcatgcaatattcccatagtataataactaacctcctctaccacgtggtaggatggacagactggaatctggctttgaacccagaaggaggccccaattgggtgcgcaactttgttgacagccccatcattgtggatatcacaaaggacaccttctacaaacagcctatgttctatcatctggggcactttagcaagttcattccagagggttcccagagagtaggcttggttgcctcacagaagaatgatctggatgctgtggcactcatgcatcctgacgggagtgcagtggtggtagtactgaacaggtctagcaaagatgttcccttgactatcaaagacccagctgtgggctttctggaaaccatttcccctggatactctatccacacctatctctggagaagacagtaatga

SEQ ID NO: 196 - protein, 536 aa, synthetic construct
  REGION 1..536: note = Variant of B-Glucocerebrosidase
MEFSSPSREECPKPLSRVSIMAGSLTGLLLLQAVSWASGARPCIPKSFGYSSVVCVCNATYCDSFDPPTFPALGTFSRYESTRSGRRMELSMGPIQANHTGTGLLLTLQPEQKFQKVKGFGGAMTDAAALNILALSPPAQNLLLKSYFSEEGIGYNIIRVPMASCDFSIRTYTYADTPDDFQLHNFSLPEEDTKLKIPLIHRALQLAQRPVSLLASPWTSPTWLKTNGAVNGKGSLKGQPGDIYHQTWARYFVKFLDAYAEHKLQFWAVTAENEPSAGLLSGYPFQCLGFTPEHQRDFIARDLGPTLANSTHHNVRLLMLDDQRLLLPHWAKVVLADPEAAKYVHGIAVHWYLDFLAPAKATLGETHRLFPNTMLFASEACVGSKFWEQSVRLGSWDRGMQYSHSIITNLLYHVVGWTDWNLALNPEGGPNWVRNFVDSPIIVDITKDTFYKQPMFYHLGHFSKFIPEGSQRVGLVASQKNDLDAVALMHPDGSAVVVVLNRSSKDVPLTIKDPAVGFLETISPGYSIHTYLWRRQ

SEQ ID NO: 197 - DNA, 1614 bp, synthetic construct
  misc_feature 1..1614: note = Variant of B-Glucocerebrosidase
  source 1..1614: mol_type = other DNA
atggagttttcttctcctagtagagaagaatgccccaagccactgagcagggtgagcatcatggctggctccctcacagggctgcttcttttgcaggcagtctcatgggcctctggagccaggccctgtattcccaggtcattcggctactcctcagtggtgtgtgtatgcaatgccacctattgtgacagttttgatcctccaactttccctgctctgggtaccttctcccggtatgagagcacaagaagtggaagacgcatggagctctcaatgggcccaatacaggctaaccgcactgggacaggtctgctgctgaccctccaacctgaacagaagtttcagaaagtcaagggatttggaggagccatgactgatgcagcagcactcaacatcttggccctgtctccaccagcccagaatctgctgttgaagtcctacttctcagaggaggggattgggtacaacatcatccgggttcccatggctagctgtgacttctccattaggacctatacatacgctgacacccccgatgattttcagctccataatttcagtctccctgaagaagacaccaaactgaagatacctctgattcacagagccttgcagctggcacaaaggccagtgagcctcttggcttctccctggactagtcctacatggctgaagactaatggtgctctgaatgggaaaggctccctgaaaggacagccaggtgacatctatcatcagacatgggcccgctactttgtgaaattccttgatgcctatgcagagcacaagctccagttctgggcagtcaccgcagaaaacgagccctcagctgggctgctgtctggctacccctttcagtgcttgggctttactcctgagcatcaacgggacttcattgcccgggatttggggccaacactggccaacagcacccaccacaatgtaagactcctcatgctggatgaccagaggctgctgctccctcattgggccaaggtggtgttgactgacccagaagctgccaaatatgttcatggcatcgctgtccactggtacctggattttttggcccctgcaaaggctactctgggagagacccacagactcttccccaactatatgctgtttgcatcagaagcctgcgtggggagcaaattctgggagcagtctgttaggctgggttcctgggatcggggcatgcaatattcccatagtataataactaacctcctctaccacgtggtaggatggacagactggaatctggctttgaacccagaaggaggccccaattgggtgcgcaactttgttgacagccccatcattgtggatatcacaaaggacaccttctacaaacagcctatgttctatcatctggggcactttagcaagttcattccagagggttcccagagagtaggcttggttgcctcacagaagaatgatctggatgctgtggcactcatgcatcctgacgggagtgcagtggtggtagtactgaacaggtctagcaaagatgttcccttgactatcaaagacccagctgtgggctttctggaaaccatttcccctggatactctatccacacctatctctggagaagacagtaatga

SEQ ID NO: 198 - protein, 536 aa, synthetic construct
  REGION 1..536: note = Variant of B-Glucocerebrosidase
MEFSSPSREECPKPLSRVSIMAGSLTGLLLLQAVSWASGARPCIPRSFGYSSVVCVCNATYCDSFDPPTFPALGTFSRYESTRSGRRMELSMGPIQANRTGTGLLLTLQPEQKFQKVKGFGGAMTDAAALNILALSPPAQNLLLKSYFSEEGIGYNIIRVPMASCDFSIRTYTYADTPDDFQLHNFSLPEEDTKLKIPLIHRALQLAQRPVSLLASPWTSPTWLKTNGALNGKGSLKGQPGDIYHQTWARYFVKFLDAYAEHKLQFWAVTAENEPSAGLLSGYPFQCLGFTPEHQRDFIARDLGPTLANSTHHNVRLLMLDDQRLLLPHWAKVVLTDPEAAKYVHGIAVHWYLDFLAPAKATLGETHRLFPNYMLFASEACVGSKFWEQSVRLGSWDRGMQYSHSIITNLLYHVVGWTDWNLALNPEGGPNWVRNFVDSPIIVDITKDTFYKQPMFYHLGHFSKFIPEGSQRVGLVASQKNDLDAVALMHPDGSAVVVVLNRSSKDVPLTIKDPAVGFLETISPGYSIHTYLWRRQ

SEQ ID NO: 199 - DNA, 1614 bp, synthetic construct
  misc_feature 1..1614: note = Variant of B-Glucocerebrosidase
  source 1..1614: mol_type = other DNA
atggagttttcttctcctagtagagaagaatgccccaagccactgagcagggtgagcatcatggctggatccctcacagggctgcttcttttgcaggcagtctcatgggcctctggagccaggccctgtattcccaagtcattcggctactcctcagtggtgtgtgtatgcaatgccacctattgtgacagtttcgatcctctcactctccctgctctgggtaccttctcccggtatgagagcacaagaagtggaagacgcatggagctctcaatgggccctatacaggctaaccacactgggacaggtctgctgctgaccctccaacctgaacagaagtttcagaaagtcaagggatttggaggagccatgactgatgcagcagcactcaacatcttggccctgtctccaccagcccagaatctgctgttgaagtcctacttctcagaggaggggattggctacaacatcatccgggttcccatggctagctgtgacttctccattaggacctatacatacgctgacacccccgatgattttcagctccataatttcagtctccctgaagaagacaccaaactgaagatacctctgattcacagagccttgcaactgtcccaaaggccagtgagcctcttcgcttctccctggactagtcctacatggctgaagactaatggtgctgttaatgggaaaggctccctgaaaggacagccaggtgacatatatcatcagacatgggcccgctactttgtgaaattccttgatgcctatgcagagcacaagctccaattctgggcagtcaccgcagaaaacgagccctcagctgggctgctgtctggctacccctttcagtgcttgggctttactcctgagcatcaacgggacttcattgcccgggatttggggccaacactggccaacagcacccaccacaatgtaagactcctcatgctggatgaccagaggctgctgctccctcattgggccaaggtggtgttggcagacccagaagctgccaaatatgttcatggcatcgctgtccactggtacctggattttttggcccctgcaaaggctactctgggagagacccacagactcttccccaataccatgctgtttgcatcagaagcctgcgtggggagcaaattctgggagcagtctgttaggctgggttcctgggatcggggcatgcaatattcccatagtataataactaacctcctctaccacgtggtaggatggacagactggaatctggctttgaacccagaaggaggccccaattgggtgcgcaactttgttgacagccccatcattgtggatatcacaaaggacaccttctacaaacagcctatgttctatcatctggggcactttagcaagttcattccagagggttcccagagagtaggcttggttgcctcacagaagaatgatctggatgctgtggcactcctgcatcctgacgggagtgcagtggtggtagtactgaacaggtctagcaaagatgttcccttgactatcaaagacccagctgtgggctttctggaaaccatttcccctggatactctatccacacctatctctggagaagacagtaatga

SEQ ID NO: 200 - protein, 536 aa, synthetic construct
  REGION 1..536: note = Variant of B-Glucocerebrosidase
MEFSSPSREECPKPLSRVSIMAGSLTGLLLLQAVSWASGARPCIPKSFGYSSVVCVCNATYCDSFDPLTLPALGTFSRYESTRSGRRMELSMGPIQANHTGTGLLLTLQPEQKFQKVKGFGGAMTDAAALNILALSPPAQNLLLKSYFSEEGIGYNIIRVPMASCDFSIRTYTYADTPDDFQLHNFSLPEEDTKLKIPLIHRALQLSQRPVSLFASPWTSPTWLKTNGAVNGKGSLKGQPGDIYHQTWARYFVKFLDAYAEHKLQFWAVTAENEPSAGLLSGYPFQCLGFTPEHQRDFIARDLGPTLANSTHHNVRLLMLDDQRLLLPHWAKVVLADPEAAKYVHGIAVHWYLDFLAPAKATLGETHRLFPNTMLFASEACVGSKFWEQSVRLGSWDRGMQYSHSIITNLLYHVVGWTDWNLALNPEGGPNWVRNFVDSPIIVDITKDTFYKQPMFYHLGHFSKFIPEGSQRVGLVASQKNDLDAVALLHPDGSAVVVVLNRSSKDVPLTIKDPAVGFLETISPGYSIHTYLWRRQ

SEQ ID NO: 201 - DNA, 1614 bp, synthetic construct
  misc_feature 1..1614: note = Variant of B-Glucocerebrosidase
  source 1..1614: mol_type = other DNA
atggagttttcttctcctagtagagaagaatgccccaagccactgagcagggtgagcatcatggctggatccctcacagggctgcttcttttgcaggcagtctcatgggcctctggagccaggccctgtattcccaagtcattcggctactcctcagtggtgtgtgtatgcaatgccacctattgtgacagtctcgatcctcccactctccctgctctgggtaccttctcccggtatgagagcacaagaagtggaagacgcatggagctctcaatgggccctatacaggctaaccgcactgggacaggtctgctgctgaccctccaacctgaacagaagtttcagaaagtcaagggatttggaggagccatgactgatgcagcagcactcaacatcttggccctgtctccaccagcccagaatctgctgttgaagtcctacttctcagaggaggggattggctacaacatcatccgggttcccatggctagctgtgacttctccattaggacctatacatacgctgacacccccgatgattttcagctccataatttcagtctccctgaagaagacaccaaactgaagatacctctgattcacagagccttgcaactgtcccaaaggccagtgagcctcttcgcttctccctggactagtcctacatggctgaagactaatggtgctgttaatgggaaaggctccctgaaaggacagccaggtgacatatatcatcagacatgggcccgctactttgtgaaattccttgatgcctatgcagagcacaagctccaattctgggcagtcaccgcagaaaacgagccctcagctgggctgctgtctggctacccctttcagtgcttgggctttactcctgagcatcaacgggacttcattgcccgggatttggggccaacactggccaacagcacccaccacaatgtaagactcctcattctggatgaccagaggctgctgctccctcattgggccaaggtggtgttgacagacccagaagctgccaaatatgttcatggcatcgctgtccactggtacctggattttttggcccctgcaaaggctactctgggagagacccacagactcttccccaataccatgctgtttgcatcagaagcctgcgtggggagcaaattctgggagcagtctgttaggctgggttcctgggatcggggcatgcaatattcccatagtataataactaacctcctctaccacgtggtaggatggacagactggaatctggctttgaacccagaaggaggccccaattgggtgcgcaactttgttgacagccccatcattgtggatatcacaaaggacaccttctacaaacagcctatgttctatcatctggggcactttagcaagttcattccagagggttcccagagagtaggcttggttgcctcacagaagaatgatctggatgctgtggcactcctgcatcctgacgggagtgcagtggtggtagtactgaacaggtctagcaaagatgttcccttgactatcaaagacccagctgtgggctttctggaaaccatttcccctggatactctatccacacctatctctggagaagacagtaatga

SEQ ID NO: 202 - protein, 536 aa, synthetic construct
  REGION 1..536: note = Variant of B-Glucocerebrosidase
MEFSSPSREECPKPLSRVSIMAGSLTGLLLLQAVSWASGARPCIPKSFGYSSVVCVCNATYCDSLDPPTLPALGTFSRYESTRSGRRMELSMGPIQANRTGTGLLLTLQPEQKFQKVKGFGGAMTDAAALNILALSPPAQNLLLKSYFSEEGIGYNIIRVPMASCDFSIRTYTYADTPDDFQLHNFSLPEEDTKLKIPLIHRALQLSQRPVSLFASPWTSPTWLKTNGAVNGKGSLKGQPGDIYHQTWARYFVKFLDAYAEHKLQFWAVTAENEPSAGLLSGYPFQCLGFTPEHQRDFIARDLGPTLANSTHHNVRLLILDDQRLLLPHWAKVVLTDPEAAKYVHGIAVHWYLDFLAPAKATLGETHRLFPNTMLFASEACVGSKFWEQSVRLGSWDRGMQYSHSIITNLLYHVVGWTDWNLALNPEGGPNWVRNFVDSPIIVDITKDTFYKQPMFYHLGHFSKFIPEGSQRVGLVASQKNDLDAVALLHPDGSAVVVVLNRSSKDVPLTIKDPAVGFLETISPGYSIHTYLWRRQ

SEQ ID NO: 203 - DNA, 1614 bp, synthetic construct
  misc_feature 1..1614: note = Variant of B-Glucocerebrosidase
  source 1..1614: mol_type = other DNA
atggagttttcttctcctagtagagaagaatgccccaagccactgagcagggtgagcatcatggctggatccctcacagggctgcttcttttgcaggcagtctcatgggcctctggagccaggccctgtattcccaagtcattcggctactcctcagtggtgtgtgtatgcaatgccacctattgtgacagtctcgatcctctcactctccctgctctgggtaccttctcccggtatgagagcacaagaagtggaagacgcatggagctctcaatgggccctatacaggctaaccacactgggacaggtctgctgctgaccctccaacctgaacagaagtttcagaaagtcaagggatttggaggagccatgactgatgcagcagcactcaacatcttggccctgtctccaccagcccagaacctgctgttgaagtcctacttctcagaggaggggattgggtacaacatcatccgggttcccatggctagctgtgacttctccattaggacctatacatacgctgacacccccgatgattttcagctccataatttcagtctccctgaagaagacaccaaactgaagatacctctgattcacagagccttgcaactgtcccaaaggccagtgagcctcttcgcttctccctggactagtcctacatggctgaagactaatggtgctgttaatgggaaaggctccctgaaaggacagccaggtgacatatatcatcagacatgggcccgctactttgtgaaattccttgatgcctatgcagagcacaagctccaattctgggcagtcaccgcagaaaacgagccctcagctgggctgctgtctggctacccctttcagtgcttgggctttactcctgagcatcaacgggacttcattgcccgggatttggggccaacactggccaacagcacccaccacaatgtaagactcctcattctggatgaccagaggctgctgctccctcattgggccaaggtggtgttgacagacccagaagctgccaaatatgttcatggcatcgctgtccactggtacctggattttttggcccctgcaaaggctactctgggagagacccacagactcttccccaataccatgctgtttgcatcagaagcctgcgtggggagcaaattctgggagcagtctgttaggctgggttcctgggatcggggcatgcaatattcccatagtataataactaacctcctctaccacgtggtaggatggacagactggaatctggctttgaacccagaaggaggccccaattgggtgcgcaactttgttgacagccccatcattgtggatatcacaaaggacaccttctacaaacagcctatgttctatcatctggggcactttagcaagttcattccagagggttcccagagagtaggcttggttgcctcacagaagaatgatctggatgctgtggcactcctgcatcctgacgggagtgcagtggtggtagtactgaacaggtctagcaaagatgttcccttgactatcaaagacccagctgtgggctttctggaaaccatttcccctggatactctatccacacctatctctggagaagacagtaatga

SEQ ID NO: 204 - protein, 536 aa, synthetic construct
  REGION 1..536: note = Variant of B-Glucocerebrosidase
MEFSSPSREECPKPLSRVSIMAGSLTGLLLLQAVSWASGARPCIPKSFGYSSVVCVCNATYCDSLDPLTLPALGTFSRYESTRSGRRMELSMGPIQANHTGTGLLLTLQPEQKFQKVKGFGGAMTDAAALNILALSPPAQNLLLKSYFSEEGIGYNIIRVPMASCDFSIRTYTYADTPDDFQLHNFSLPEEDTKLKIPLIHRALQLSQRPVSLFASPWTSPTWLKTNGAVNGKGSLKGQPGDIYHQTWARYFVKFLDAYAEHKLQFWAVTAENEPSAGLLSGYPFQCLGFTPEHQRDFIARDLGPTLANSTHHNVRLLILDDQRLLLPHWAKVVLTDPEAAKYVHGIAVHWYLDFLAPAKATLGETHRLFPNTMLFASEACVGSKFWEQSVRLGSWDRGMQYSHSIITNLLYHVVGWTDWNLALNPEGGPNWVRNFVDSPIIVDITKDTFYKQPMFYHLGHFSKFIPEGSQRVGLVASQKNDLDAVALLHPDGSAVVVVLNRSSKDVPLTIKDPAVGFLETISPGYSIHTYLWRRQ

SEQ ID NO: 205 - DNA, 1614 bp, synthetic construct
  misc_feature 1..1614: note = Variant of B-Glucocerebrosidase
  source 1..1614: mol_type = other DNA
atggagttttcttctcctagtagagaagaatgccccaagccactgagcagggtgagcatcatggctggatccctcacagggctgcttcttttgcaggcagtctcatgggcctctggagccaggccctgtattcccaagtcattcggctactcctcagtggtgtgtgtatgcaatgccacctattgtgacagtttcgatcctgtcactctccctgctctgggtaccttctcccggtatgagagcacaagaagtggaagacgcatggagctctcaatgggccctatacaggctaaccacactgggacaggtctgctgctgaccctccaacctgaacagaagtttcagaaagtcaagggatttggaggagccatgactgatgcagcagcactcaacatcttggccctgtctccaccagcccagaatctgctgttgaagtcctacttctcagaggaggggattggctacaacatcatccgggttcccatggctagctgtgacttctccattaggacctatacatacgctgacacccccgatgattttcagctccataatttcagtctccctgaagaagacaccaaactgaagatacctctgattcacagagccttgcaactgtcccaaaggccagtgagcctcttcgcttctccctggactagtcctacatggctgaagactaatggtgctgttaatgggaaaggctccctgaaaggacagccaggtgacatatatcatcagacatgggcccgctactttgtgaaattccttgatgcctatgcagagcacaagctccaattctgggcagtcaccgcagaaaacgagccctcagctgggctgctgtctggctacccctttcagtgcttgggctttactcctgagcatcaacgggacttcattgcccgggatttggggccaacactggccaacagcacccaccacaatgtaagactcctcattctggatgaccagaggctgctgctccctcattgggccaaggtggtgttgacagacccagaagctgccaaatatgttcatggcatcgctgtccactggtacctggattttttggcccctgcaaaggctactctgggagagacccacagactcttccccaataccatgctgtttgcatcagaagcctgcgtggggagcaaattctgggagcagtctgttaggctgggttcctgggatcggggcatgcaatattcccatagtataataactaacctcctctaccacgtggtaggatggacagactggaatctggctttgaacccagaaggaggccccaattgggtgcgcaactttgttgacagccccatcattgtggatatcacaaaggacaccttctacaaacagcctatgttctatcatctggggcactttagcaagttcattccagagggttcccagagagtaggcttggttgcctcacagaagaatgatctggatgctgtggcactcctgcatcctgacgggagtgcagtggtggtagtactgaacaggtctagcaaagatgttcccttgactatcaaagacccagctgtgggctttctggaaaccatttcccctggatactctatccacacctatctctggagaagacagtaatga

SEQ ID NO: 206 - protein, 536 aa, synthetic construct
  REGION 1..536: note = Variant of B-Glucocerebrosidase
MEFSSPSREECPKPLSRVSIMAGSLTGLLLLQAVSWASGARPCIPKSFGYSSVVCVCNATYCDSFDPVTLPALGTFSRYESTRSGRRMELSMGPIQANHTGTGLLLTLQPEQKFQKVKGFGGAMTDAAALNILALSPPAQNLLLKSYFSEEGIGYNIIRVPMASCDFSIRTYTYADTPDDFQLHNFSLPEEDTKLKIPLIHRALQLSQRPVSLFASPWTSPTWLKTNGAVNGKGSLKGQPGDIYHQTWARYFVKFLDAYAEHKLQFWAVTAENEPSAGLLSGYPFQCLGFTPEHQRDFIARDLGPTLANSTHHNVRLLILDDQRLLLPHWAKVVLTDPEAAKYVHGIAVHWYLDFLAPAKATLGETHRLFPNTMLFASEACVGSKFWEQSVRLGSWDRGMQYSHSIITNLLYHVVGWTDWNLALNPEGGPNWVRNFVDSPIIVDITKDTFYKQPMFYHLGHFSKFIPEGSQRVGLVASQKNDLDAVALLHPDGSAVVVVLNRSSKDVPLTIKDPAVGFLETISPGYSIHTYLWRRQ

SEQ ID NO: 207 - DNA, 1614 bp, synthetic construct
  misc_feature 1..1614: note = Variant of B-Glucocerebrosidase
  source 1..1614: mol_type = other DNA
atggagttttcttctcctagtagagaagaatgccccaagccactgagcagggtgagcatcatggctggatccctcacagggctgcttcttttgcaggcagtctcatgggcctctggagccaggccctgtattcccaagtcattcggctactcctcagtggtgtgtgtatgcaatgccacctattgtgacagtttcgatcctgtcactctccctgctctgggtaccttctcccggtatgagagcacaagaagtggaagacgcatggagctctcaatgggccctatacaggctaaccacactgggacaggtctgctgctgaccctccaacctgaacagaagtttcagaaagtcaagggatttggaggagccatgactgatgcagcagcactcaacatcttggccctgtctccaccagcccagaatctgctgttgaagtcctacttctcagaggaggggattggctacaacatcatccgggttcccatggctagctgtgacttctccattaggacctatacatacgctgacacccccgatgattttcagctccataatttcagtctccctgaagaagacaccaaactgaagatacctctgattcacagagccttgcaactgtcccaaaggccagtgagcctcttcgcttctccctggactagtcctacatggctgaagactaatggtgctgttaatgggaaaggctccctgaaaggacagccaggtgacatatatcatcagacatgggcccgctactttgtgaaattccttgatgcctatgcagagcacaagctccaattctgggcagtcaccgcagaaaacgagccctcagctgggctgctgtctggctacccctttcagtgcttgggctttactcctgagcatcaacgggacttcattgcccgggatttggggccaacactggccaacagcacccaccacaatgtaagactcctcatgctggatgaccagaggctgctgctccctcattgggccaaggtggtgttgacagacccagaagctgccaaatatgttcatggcatcgctgtccactggtacctggattttttggcccctgcaaaggctactctgggagagacccacagactcttccccaataccatgctgtttgcatcagaagcctgcgtggggagcaaattctgggagcagtctgttaggctgggttcctgggatcggggcatgcaatattcccatagtataataactaacctcctctaccacgtggtaggatggacagactggaatctggctttgaacccagaaggaggccccaattgggtgcgcaactttgttgacagccccatcattgtggatatcacaaaggacaccttctacaaacagcctatgttctatcatctggggcactttagcaagttcattccagagggttcccagagagtaggcttggttgcctcacagaagaatgatctggatgctgtggcactcctgcatcctgacgggagtgcagtggtggtagtactgaacaggtctagcaaagatgttcccttgactatcaaagacccagctgtgggctttctggaaaccatttcccctggatactctatccacacctatctctggagaagacagtaatga

SEQ ID NO: 208 - protein, 536 aa, synthetic construct
  REGION 1..536: note = Variant of B-Glucocerebrosidase
MEFSSPSREECPKPLSRVSIMAGSLTGLLLLQAVSWASGARPCIPKSFGYSSVVCVCNATYCDSFDPVTLPALGTFSRYESTRSGRRMELSMGPIQANHTGTGLLLTLQPEQKFQKVKGFGGAMTDAAALNILALSPPAQNLLLKSYFSEEGIGYNIIRVPMASCDFSIRTYTYADTPDDFQLHNFSLPEEDTKLKIPLIHRALQLSQRPVSLFASPWTSPTWLKTNGAVNGKGSLKGQPGDIYHQTWARYFVKFLDAYAEHKLQFWAVTAENEPSAGLLSGYPFQCLGFTPEHQRDFIARDLGPTLANSTHHNVRLLMLDDQRLLLPHWAKVVLTDPEAAKYVHGIAVHWYLDFLAPAKATLGETHRLFPNTMLFASEACVGSKFWEQSVRLGSWDRGMQYSHSIITNLLYHVVGWTDWNLALNPEGGPNWVRNFVDSPIIVDITKDTFYKQPMFYHLGHFSKFIPEGSQRVGLVASQKNDLDAVALLHPDGSAVVVVLNRSSKDVPLTIKDPAVGFLETISPGYSIHTYLWRRQ

SEQ ID NO: 209 - DNA, 1614 bp, synthetic construct
  misc_feature 1..1614: note = Variant of B-Glucocerebrosidase
  source 1..1614: mol_type = other DNA
atggagttttcttctcctagtagagaagaatgccccaagccactgagcagggtgagcatcatggctggatccctcacagggctgcttcttttgcaggcagtctcatgggcctctggagccaggccctgtattcccaagtcattcggctactcctcagtggtgtgtgtatgcaatgccacctattgtgacagtctcgatcctcccactctccctgctctgggtaccttctcccggtatgagagcacaagaagtggaagacgcatggagctctcaatgggccctatacaggctaaccacactgggacaggtctgctgctgaccctccaacctgaacagaagtttcagaaagtcaagggatttggaggagccatgactgatgcagcagcactcaacatcttggccctgtctccaccagcccagaacctgctgttgaagtcctacttctcagaggaggggattggctacaacatcatccgggttcccatggctagctgtgacttctccattaggacctatacatacgctgacacccccgatgattttcagctccataatttcagtctccctgaagaagacaccaaactgaagatacctctgattcacagagccttgcaactgtcccaaaggccagtgagcctcttcgcttctccctggactagtcctacatggctgaagactaatggtgctgtgaatgggaaaggctccctgaaaggacagccaggtgacatatatcatcagacatgggcccgctactttgtgaaattccttgatgcctatgcagagcacaagctccaattctgggcagtcaccgcagaaaacgagccctcagctgggctgctgtctggctacccctttcagtgcttgggctttactcctgagcatcaacgggacttcattgcccgggatttggggccaacactggccaacagcacccaccacaatgtaagactcctcattctggatgaccagaggctgctgctccctcattgggccaaggtggtgttgacagacccagaagctgccaaatatgttcatggcatcgctgtccactggtacctggattttttggcccctgcaaaggctactctgggagagacccacagactcttccccaataccatgctgtttgcatcagaagcctgcgtggggagcaaattctgggagcagtctgttaggctgggttcctgggatcggggcatgcaatattcccatagtataataactaacctcctctaccacgtggtaggatggacagactggaatctggctttgaacccagaaggaggccccaattgggtgcgcaactttgttgacagccccatcattgtggatatcacaaaggacaccttctacaaacagcctatgttctatcatctggggcactttagcaagttcattccagagggttcccagagagtaggcttggttgcctcacagaagaatgatctggatgctgtggcactcctgcatcctgacgggagtgcagtggtggtagtactgaacaggtctagcaaagatgttcccttgactatcaaagacccagctgtgggctttctggaaaccatttcccctggatactctatccacacctatctctggagaagacagtaatga

SEQ ID NO: 210 - protein, 536 aa, synthetic construct
  REGION 1..536: note = Variant of B-Glucocerebrosidase
MEFSSPSREECPKPLSRVSIMAGSLTGLLLLQAVSWASGARPCIPKSFGYSSVVCVCNATYCDSLDPPTLPALGTFSRYESTRSGRRMELSMGPIQANHTGTGLLLTLQPEQKFQKVKGFGGAMTDAAALNILALSPPAQNLLLKSYFSEEGIGYNIIRVPMASCDFSIRTYTYADTPDDFQLHNFSLPEEDTKLKIPLIHRALQLSQRPVSLFASPWTSPTWLKTNGAVNGKGSLKGQPGDIYHQTWARYFVKFLDAYAEHKLQFWAVTAENEPSAGLLSGYPFQCLGFTPEHQRDFIARDLGPTLANSTHHNVRLLILDDQRLLLPHWAKVVLTDPEAAKYVHGIAVHWYLDFLAPAKATLGETHRLFPNTMLFASEACVGSKFWEQSVRLGSWDRGMQYSHSIITNLLYHVVGWTDWNLALNPEGGPNWVRNFVDSPIIVDITKDTFYKQPMFYHLGHFSKFIPEGSQRVGLVASQKNDLDAVALLHPDGSAVVVVLNRSSKDVPLTIKDPAVGFLETISPGYSIHTYLWRRQ

SEQ ID NO: 211 - DNA, 1614 bp, synthetic construct
  misc_feature 1..1614: note = Variant of B-Glucocerebrosidase
  source 1..1614: mol_type = other DNA
atggagttttcttctcctagtagagaagaatgccccaagccactgagcagggtgagcatcatggctggatccctcacagggctgcttcttttgcaggcagtctcatgggcctctggagccaggccctgtattcccaagtcattcggctactcctcagtggtgtgtgtatgcaatgccacctattgtgacagtttcgatcctccaactctccctgctctgggtaccttctcccggtatgagagcacaagaagtggaagacgcatggagctctcaatgggccctatacaggctaaccacactgggacaggtctgctgctgaccctccaacctgaacagaagtttcagaaagtcaagggatttggaggagccatgactgatgcagcagcactcaacatcttggccctgtctccaccagcccagaatctgctgttgaagtcctacttctcagaggaggggattggctacaacatcatccgggttcccatggctagctgtgacttctccattaggacctatacatacgctgacacccccgatgattttcagctccataatttcagtctccctgaagaagacaccaaaatgaagatacctctgattcacagagccttgcaactgtcccaaaggccagtgagcctcttcgcttctccctggactagtcctacatggctgaagactaatggtgctgtgaatgggaaaggctccctgaaaggacagccaggtgacatatatcatcagacatgggcccgctactttgtgaaattccttgatgcctatgcagagcacaagctccaattctgggcagtcaccgcagaaaacgagccctcagctgggctgctgtctggctacccctttcagtgcttgggctttactcctgagcatcaacgggacttcattgcccgggatttggggccaacactggccaacagcacccaccacaatgtaagactcctcatgctggatgaccagaggctgctgctccctcattgggccaaggtggtgttgacagacccagaagctgccaaatatgttcatggcatcgctgtccactggtacctggattttttggcccctgcaaaggctactctgggagagacccacagactcttccccaataccatgctgtttgcatcagaagcctgcgtggggagcaaattctgggagcagtctgttaggctgggttcctgggatcggggcatgcaatattcccatagtataataactaacctcctctaccacgtggtaggatggacagactggaatctggctttgaacccagaaggaggccccaattgggtgcgcaactttgttgacagccccatcattgtggatatcacaaaggacaccttctacaaacagcctatgttctatcatctggggcactttagcaagttcattccagagggttcccagagagtaggcttggttgcctcacagaagaatgatctggatgctgtggcactcctgcatcctgacgggagtgcagtggtggtagtactgaacaggtctagcaaagatgttcccttgactatcaaagacccagctgtgggctttctggaaaccatttcccctggatactctatccacacctatctctggagaagacagtaatga

SEQ ID NO: 212 - protein, 536 aa, synthetic construct
  REGION 1..536: note = Variant of B-Glucocerebrosidase
MEFSSPSREECPKPLSRVSIMAGSLTGLLLLQAVSWASGARPCIPKSFGYSSVVCVCNATYCDSFDPPTLPALGTFSRYESTRSGRRMELSMGPIQANHTGTGLLLTLQPEQKFQKVKGFGGAMTDAAALNILALSPPAQNLLLKSYFSEEGIGYNIIRVPMASCDFSIRTYTYADTPDDFQLHNFSLPEEDTKMKIPLIHRALQLSQRPVSLFASPWTSPTWLKTNGAVNGKGSLKGQPGDIYHQTWARYFVKFLDAYAEHKLQFWAVTAENEPSAGLLSGYPFQCLGFTPEHQRDFIARDLGPTLANSTHHNVRLLMLDDQRLLLPHWAKVVLTDPEAAKYVHGIAVHWYLDFLAPAKATLGETHRLFPNTMLFASEACVGSKFWEQSVRLGSWDRGMQYSHSIITNLLYHVVGWTDWNLALNPEGGPNWVRNFVDSPIIVDITKDTFYKQPMFYHLGHFSKFIPEGSQRVGLVASQKNDLDAVALLHPDGSAVVVVLNRSSKDVPLTIKDPAVGFLETISPGYSIHTYLWRRQ

SEQ ID NO: 213 - DNA, 1614 bp, synthetic construct
  misc_feature 1..1614: note = Variant of B-Glucocerebrosidase
  source 1..1614: mol_type = other DNA
atggagttttcttctcctagtagagaagaatgccccaagccactgagcagggtgagcatcatggctggatccctcacagggctgcttcttttgcaggcagtctcatgggcctctggagccaggccctgtattcccaagtcattcggctactcctcagtggtgtgtgtatgcaatgccacctattgtgacagtctcgatcctcccactctccctgctctgggtaccttctcccggtatgagagcacaagaagtggaagacgcatggagctctcaatgggccctatacaggctaaccacactgggacaggtctgctgctgaccctccaacctgaacagaagtttcagaaagtcaagggatttggaggagccatgactgatgcagcagcactcaacatcttggccctgtctccaccagcccagaatctgctgttgaagtcctacttctcagaggaggggattgagtacaacatcatccgggttcccatggctagctgtgacttctccattaggacctatacatacgctgacacccccgatgattttcagctccataatttcagtctccctgaagaagacaccaaactgaagatacctctgattcacagagccttgcaactgtcccaaaggccagtgagcctcttcgcttctccctggactagtcctacatggctgaagactaatggtgctgtgaatgggaaaggctccctgaaaggacagccaggtgacatatatcatcagacatgggcccgctactttgtgaaattccttgatgcctatgcagagcacaagctccaattctgggcagtcaccgcagaaaacgagccctcagctgggctgctgtctggctacccctttcagtgcttgggctttactcctgagcatcaacgggacttcattgcccgggatttggggccaacactggccaacagcacccaccacaatgtaagactcctcattctggatgaccagaggctgctgctccctcattgggccaaggtggtgttgacagacccagaagctgccaaatatgttcatggcatcgctgtccactggtacctggattttttggcccctgcaaaggctactctgggagagacccacagactcttccccaataccatgctgtttgcatcagaagcctgcgtggggagcaaattctgggagcagtctgttaggctgggttcctgggatcggggcatgcaatattcccatagtataataactaacctcctctaccacgtggtaggatggacagactggaatctggctttgaacccagaaggaggccccaattgggtgcgcaactttgttgacagccccatcattgtggatatcacaaaggacaccttctacaaacagcctatgttctatcatctggggcactttagcaagttcattccagagggttcccagagagtaggcttggttgcctcacagaagaatgatctggatgctgtggcactcctgcatcctgacgggagtgcagtggtggtagtactgaacaggtctagcaaagatgttcccttgactatcaaagacccagctgtgggctttctggaaaccatttcccctggatactctatccacacctatctctggagaagacagtaatga

SEQ ID NO: 214 - protein, 536 aa, synthetic construct
  REGION 1..536: note = Variant of B-Glucocerebrosidase
MEFSSPSREECPKPLSRVSIMAGSLTGLLLLQAVSWASGARPCIPKSFGYSSVVCVCNATYCDSLDPPTLPALGTFSRYESTRSGRRMELSMGPIQANHTGTGLLLTLQPEQKFQKVKGFGGAMTDAAALNILALSPPAQNLLLKSYFSEEGIEYNIIRVPMASCDFSIRTYTYADTPDDFQLHNFSLPEEDTKLKIPLIHRALQLSQRPVSLFASPWTSPTWLKTNGAVNGKGSLKGQPGDIYHQTWARYFVKFLDAYAEHKLQFWAVTAENEPSAGLLSGYPFQCLGFTPEHQRDFIARDLGPTLANSTHHNVRLLILDDQRLLLPHWAKVVLTDPEAAKYVHGIAVHWYLDFLAPAKATLGETHRLFPNTMLFASEACVGSKFWEQSVRLGSWDRGMQYSHSIITNLLYHVVGWTDWNLALNPEGGPNWVRNFVDSPIIVDITKDTFYKQPMFYHLGHFSKFIPEGSQRVGLVASQKNDLDAVALLHPDGSAVVVVLNRSSKDVPLTIKDPAVGFLETISPGYSIHTYLWRRQ

SEQ ID NO: 215 - DNA, 1614 bp, synthetic construct
  misc_feature 1..1614: note = Variant of B-Glucocerebrosidase
  source 1..1614: mol_type = other DNA
atggagttttcttctcctagtagagaagaatgccccaagccactgagcagggtgagcatcatggctggatccctcacagggctgcttcttttgcaggcagtctcatgggcctctggagccaggccctgtattcccaagtcattcggctactcctcagtggtgtgtgtatgcaatgccacctattgtgacagtctcgatcctctcactctccctgctctgggtaccttctcccggtatgagagcacaagaagtggaagacgcatggagctctcaatgggccctatacaggctaaccacactgggacaggtctgctgctgaccctccaacctgaacagaagtttcagaaagtcaagggatttggaggagccatgactgatgcagcagcactcaacatcttggccctgtctccaccagcccagaatctgctgttgaagtcctacttctcagaggaggggattgggtacaacatcatccgggttcccatggctagctgtgacttctccattaggacctatacatacgctgacacccccgatgattttcagctccataatttcagtctccctgaagaagacaccaaactgaagatacctctgattcacagagccttgcaactgtcccaaaggccagtgagcctcttcgcttctccctggactagtcctacatggctgaagactaatggtgctctgaatgggaaaggctccctgaaaggacagccaggtgacatatatcatcagacatgggcccgctactttgtgaaattccttgatgcctatgcagagcacaagctccaattctgggcagtcaccgcagaaaacgagccctcagctgggctgctgtctggctacccctttcagtgcttgggctttactcctgagcatcaacgggacttcattgcccgggatttggggccaacactggccaacagcacccaccacaatgtaagactcctcatgctggatgaccagaggctgctgctccctcattgggccaaggtggtgttgacagacccagaagctgccaaatatgttcatggcatcgctgtccactggtacctggattttttggcccctgcaaaggctactctgggagagacccacagactcttccccaataccatgctgtttgcatcagaagcctgcgtggggagcaaattctgggagcagtctgttaggctgggttcctgggatcggggcatgcaatattcccatagtataataactaacctcctctaccacgtggtaggatggacagactggaatctggctttgaacccagaaggaggccccaattgggtgcgcaactttgttgacagccccatcattgtggatatcacaaaggacaccttctacaaacagcctatgttctatcatctggggcactttagcaagttcattccagagggttcccagagagtaggcttggttgcctcacagaagaatgatctggatgctgtggcactcctgcatcctgacgggagtgcagtggtggtagtactgaacaggtctagcaaagatgttcccttgactatcaaagacccagctgtgggctttctggaaaccatttcccctggatactctatccacacctatctctggagaagacagtaatga

SEQ ID NO: 216 - protein, 536 aa, synthetic construct
  REGION 1..536: note = Variant of B-Glucocerebrosidase
MEFSSPSREECPKPLSRVSIMAGSLTGLLLLQAVSWASGARPCIPKSFGYSSVVCVCNATYCDSLDPLTLPALGTFSRYESTRSGRRMELSMGPIQANHTGTGLLLTLQPEQKFQKVKGFGGAMTDAAALNILALSPPAQNLLLKSYFSEEGIGYNIIRVPMASCDFSIRTYTYADTPDDFQLHNFSLPEEDTKLKIPLIHRALQLSQRPVSLFASPWTSPTWLKTNGALNGKGSLKGQPGDIYHQTWARYFVKFLDAYAEHKLQFWAVTAENEPSAGLLSGYPFQCLGFTPEHQRDFIARDLGPTLANSTHHNVRLLMLDDQRLLLPHWAKVVLTDPEAAKYVHGIAVHWYLDFLAPAKATLGETHRLFPNTMLFASEACVGSKFWEQSVRLGSWDRGMQYSHSIITNLLYHVVGWTDWNLALNPEGGPNWVRNFVDSPIIVDITKDTFYKQPMFYHLGHFSKFIPEGSQRVGLVASQKNDLDAVALLHPDGSAVVVVLNRSSKDVPLTIKDPAVGFLETISPGYSIHTYLWRRQ

SEQ ID NO: 217 - DNA, 1614 bp, synthetic construct
  misc_feature 1..1614: note = Variant of B-Glucocerebrosidase
  source 1..1614: mol_type = other DNA
atggagttttcttctcctagtagagaagaatgccccaagccactgagcagggtgagcatcatggctggatccctcacagggctgcttcttttgcaggcagtctcatgggcctctggagccaggccctgtattcccaagtcattcggctactcctcagtggtgtgtgtatgcaatgccacctattgtgacagtctcgatcctcccactctccctgctctgggtaccttctcccggtatgagagcacaagaagtggaagacgcatggagctctcaatgggccctatacaggctaaccacactgggacaggtctgctgctgaccctccaacctgaacagaagtttcagaaagtcaagggatttggaggagccatgactgatgcagcagcactcaacatcttggccctgtctccaccagcccagaatctgctgttgaagtcctacttctcagaggaggggattgggtacaacatcatccgggttcccatggctagctgtgacttctccattaggacctatacatacgctgacacccccgatgattttcagctccataatttcagtctccctgaagaagacaccaaactgaagatacctctgattcacagagccttgcaactgtcccaaaggccagtgagcctcttcgcttctccctggactagtcctacatggctgaagactaatggtgctgtgaatgggaaaggctccctgaaaggacagccaggtgacatatatcatcagacatgggcccgctactttgtgaaattccttgatgcctatgcagagcacaagctccaattctgggcagtcaccgcagaaaacgagccctcagctgggctgctgtctggctacccctttcagtgcttgggctttactcctgagcatcaacgggacttcattgcccgggatttggggccaacactggccaacagcacccaccacaatgtaagactcctcatgctggatgaccagaggctgctgctccctcattgggccaaggtggtgttgacagacccagaagctgccaaatatgttcatggcatcgctgtccactggtacctggattttttggcccctgcaaaggctactctgggagagacccacagactcttccccaataccatgctgtttgcatcagaagcctgcgtggggagcaaattctgggagcagtctgttaggctgggttcctgggatcggggcatgcaatattcccatagtataataactaacctcctctaccacgtggtaggatggacagactggaatctggctttgaacccagaaggaggccccaattgggtgcgcaactttgttgacagccccatcattgtggatatcacaaaggacaccttctacaaacagcctatgttctatcatctggggcactttagcaagttcattccagagggttcccagagagtaggcttggttgcctcacagaagaatgatctggatgctgtggcactcctgcatcctgacgggagtgcagtggtggtagtactgaacaggtctagcaaagatgttcccttgactatcaaagacccagctgtgggctttctggaaaccatttcccctggatactctatccacacctatctctggagaagacagtaatga

SEQ ID NO: 218 - protein, 536 aa, synthetic construct
  REGION 1..536: note = Variant of B-Glucocerebrosidase
MEFSSPSREECPKPLSRVSIMAGSLTGLLLLQAVSWASGARPCIPKSFGYSSVVCVCNATYCDSLDPPTLPALGTFSRYESTRSGRRMELSMGPIQANHTGTGLLLTLQPEQKFQKVKGFGGAMTDAAALNILALSPPAQNLLLKSYFSEEGIGYNIIRVPMASCDFSIRTYTYADTPDDFQLHNFSLPEEDTKLKIPLIHRALQLSQRPVSLFASPWTSPTWLKTNGAVNGKGSLKGQPGDIYHQTWARYFVKFLDAYAEHKLQFWAVTAENEPSAGLLSGYPFQCLGFTPEHQRDFIARDLGPTLANSTHHNVRLLMLDDQRLLLPHWAKVVLTDPEAAKYVHGIAVHWYLDFLAPAKATLGETHRLFPNTMLFASEACVGSKFWEQSVRLGSWDRGMQYSHSIITNLLYHVVGWTDWNLALNPEGGPNWVRNFVDSPIIVDITKDTFYKQPMFYHLGHFSKFIPEGSQRVGLVASQKNDLDAVALLHPDGSAVVVVLNRSSKDVPLTIKDPAVGFLETISPGYSIHTYLWRRQ

SEQ ID NO: 219 - DNA, 1614 bp, synthetic construct
  misc_feature 1..1614: note = Variant of B-Glucocerebrosidase
  source 1..1614: mol_type = other DNA
atggagttttcttctcctagtagagaagaatgccccaagccactgagcagggtgagcatcatggctggatccctcacagggctgcttcttttgcaggcagtctcatgggcctctggagccaggccctgtattcccaagtcattcggctactcctcagtggtgtgtgtatgcaatgccacctattgtgacagtctcgatcctctcactctccctgctctgggtaccttctcccggtatgagagcacaagaagtggaagacgcatggagctctcaatgggccctatacaggctaaccgcactgggacaggtctgctgctgaccctccaacctgaacagaagtttcagaaagtcaagggatttggaggagccatgactgatgcagcagcactcaacatcttggccctgtctccaccagcccagaacctgctgttgaagtcctacttctcagaggaggggattgagtacaacatcatccgggttcccatggctagctgtgacttctccattaggacctatacatacgctgacacccccgatgattttcagctccataatttcagtctccctgaagaagacaccaaactgaagatacctctgattcacagagccttgcaactgtcccaaaggccagtgagcctcttcgcttctccctggactagtcctacatggctgaagactaatggtgctctgaatgggaaaggctccctgaaaggacagccaggtgacatatatcatcagacatgggcccgctactttgtgaaattccttgatgcctatgcagagcacaagctccaattctgggcagtcaccgcagaaaacgagccctcagctgggctgctgtctggctacccctttcagtgcttgggctttactcctgagcatcaacgggacttcattgcccgggatttggggccaacactggccaacagcacccaccacaatgtaagactcctcattctggatgaccagaggctgctgctccctcattgggccaaggtggtgttgacagacccagaagctgccaaatatgttcatggcatcgctgtccactggtacctggattttttggcccctgcaaaggctactctgggagagacccacagactcttccccaataccatgctgtttgcatcagaagcctgcgtggggagcaaattctgggagcagtctgttaggctgggttcctgggatcggggcatgcaatattcccatagtataataactaacctcctctaccacgtggtaggatggacagactggaatctggctttgaacccagaaggaggccccaattgggtgcgcaactttgttgacagccccatcattgtggatatcacaaaggacaccttctacaaacagcctatgttctatcatctggggcactttagcaagttcattccagagggttcccagagagtaggcttggttgcctcacagaagaatgatctggatgctgtggcactcctgcatcctgacgggagtgcagtggtggtagtactgaacaggtctagcaaagatgttcccttgactatcaaagacccagctgtgggctttctggaaaccatttcccctggatactctatccacacctatctctggagaagacagtaatga

SEQ ID NO: 220 - protein, 536 aa, synthetic construct
  REGION 1..536: note = Variant of B-Glucocerebrosidase
MEFSSPSREECPKPLSRVSIMAGSLTGLLLLQAVSWASGARPCIPKSFGYSSVVCVCNATYCDSLDPLTLPALGTFSRYESTRSGRRMELSMGPIQANRTGTGLLLTLQPEQKFQKVKGFGGAMTDAAALNILALSPPAQNLLLKSYFSEEGIEYNIIRVPMASCDFSIRTYTYADTPDDFQLHNFSLPEEDTKLKIPLIHRALQLSQRPVSLFASPWTSPTWLKTNGALNGKGSLKGQPGDIYHQTWARYFVKFLDAYAEHKLQFWAVTAENEPSAGLLSGYPFQCLGFTPEHQRDFIARDLGPTLANSTHHNVRLLILDDQRLLLPHWAKVVLTDPEAAKYVHGIAVHWYLDFLAPAKATLGETHRLFPNTMLFASEACVGSKFWEQSVRLGSWDRGMQYSHSIITNLLYHVVGWTDWNLALNPEGGPNWVRNFVDSPIIVDITKDTFYKQPMFYHLGHFSKFIPEGSQRVGLVASQKNDLDAVALLHPDGSAVVVVLNRSSKDVPLTIKDPAVGFLETISPGYSIHTYLWRRQ

SEQ ID NO: 221 - DNA, 1614 bp, synthetic construct
  misc_feature 1..1614: note = Variant of B-Glucocerebrosidase
  source 1..1614: mol_type = other DNA
atggagttttcttctcctagtagagaagaatgccccaagccactgagcagggtgagcatcatggctggatccctcacagggctgcttcttttgcaggcagtctcatgggcctctggagccaggccctgtattcccaagtcattcggctactcctcagtggtgtgtgtatgcaatgccacctattgtgacagtttcgatcctctcactctccctgctctgggtaccttctcccggtatgagagcacaagaagtggaagacgcatggagctctcaatgggccctatacaggctaaccacactgggacaggtctgctgctgaccctccaacctgaacagaagtttcagaaagtcaagggatttggaggagccatgactgatgcagcagcactcaacatcttggccctgtctccaccagcccagaatctgctgttgaagtcctacttctcagaggaggggattgggtacaacatcatccgggttcccatggctagctgtgacttctccattaggacctatacatacgctgacacccccgatgattttcagctccataatttcagtctccctgaagaagacaccaaactgaagatacctctgattcacagagccttgcaactgtcccaaaggccagtgagcctcttcgcttctccctggactagtcctacatggctgaagactaatggtgctctgaatgggaaaggctccctgaaaggacagccaggtgacatatatcatcagacatgggcccgctactttgtgaaattccttgatgcctatgcagagcacaagctccaattctgggcagtcaccgcagaaaacgagccctcagctgggctgctgtctggctacccctttcagtgcttgggctttactcctgagcatcaacgggacttcattgcccgggatttggggccaacactggccaacagcacccaccacaatgtaagactcctcatgctggatgaccagaggctgctgctccctcattgggccaaggtggtgttgacagacccagaagctgccaaatatgttcatggcatcgctgtccactggtacctggattttttggcccctgcaaaggctactctgggagagacccacagactcttccccaataccatgctgtttgcatcagaagcctgcgtggggagcaaattctgggagcagtctgttaggctgggttcctgggatcggggcatgcaatattcccatagtataataactaacctcctctaccacgtggtaggatggacagactggaatctggctttgaacccagaaggaggccccaattgggtgcgcaactttgttgacagccccatcattgtggatatcacaaaggacaccttctacaaacagcctatgttctatcatctggggcactttagcaagttcattccagagggttcccagagagtaggcttggttgcctcacagaagaatgatctggatgctgtggcactcctgcatcctgacgggagtgcagtggtggtagtactgaacaggtctagcaaagatgttcccttgactatcaaagacccagctgtgggctttctggaaaccatttcccctggatactctatccacacctatctctggagaagacagtaatga

SEQ ID NO: 222 - protein, 536 aa, synthetic construct
  REGION 1..536: note = Variant of B-Glucocerebrosidase
MEFSSPSREECPKPLSRVSIMAGSLTGLLLLQAVSWASGARPCIPKSFGYSSVVCVCNATYCDSFDPLTLPALGTFSRYESTRSGRRMELSMGPIQANHTGTGLLLTLQPEQKFQKVKGFGGAMTDAAALNILALSPPAQNLLLKSYFSEEGIGYNIIRVPMASCDFSIRTYTYADTPDDFQLHNFSLPEEDTKLKIPLIHRALQLSQRPVSLFASPWTSPTWLKTNGALNGKGSLKGQPGDIYHQTWARYFVKFLDAYAEHKLQFWAVTAENEPSAGLLSGYPFQCLGFTPEHQRDFIARDLGPTLANSTHHNVRLLMLDDQRLLLPHWAKVVLTDPEAAKYVHGIAVHWYLDFLAPAKATLGETHRLFPNTMLFASEACVGSKFWEQSVRLGSWDRGMQYSHSIITNLLYHVVGWTDWNLALNPEGGPNWVRNFVDSPIIVDITKDTFYKQPMFYHLGHFSKFIPEGSQRVGLVASQKNDLDAVALLHPDGSAVVVVLNRSSKDVPLTIKDPAVGFLETISPGYSIHTYLWRRQ

SEQ ID NO: 223 - DNA, 1614 bp, synthetic construct
  misc_feature 1..1614: note = Variant of B-Glucocerebrosidase
  source 1..1614: mol_type = other DNA
atggagttttcttctcctagtagagaagaatgccccaagccactgagcagggtgagcatcatggctggatccctcacagggctgcttcttttgcaggcagtctcatgggcctctggagccaggccctgtattcccaagtcattcggctactcctcagtggtgtgtgtatgcaatgccacctattgtgacagtctcgatcctgtcactctccctgctctgggtaccttctcccggtatgagagcacaagaagtggaagacgcatggagctctcaatgggccctatacaggctaaccacactgggacaggtctgctgctgaccctccaacctgaacagaagtttcagaaagtcaagggatttggaggagccatgactgatgcagcagcactcaacatcttggccctgtctccaccagcccagaatctgctgttgaagtcctacttctcagaggaggggattgggtacaacatcatccgggttcccatggctagctgtgacttctccattaggacctatacatacgctgacacccccgatgattttcagctccataatttcagtctccctgaagaagacaccaaactgaagatacctctgattcacagagccttgcaactgtcccaaaggccagtgagcctcttcgcttctccctggactagtcctacatggctgaagactaatggtgctgttaatgggaaaggctccctgaaaggacagccaggtgacatatatcatcagacatgggcccgctactttgtgaaattccttgatgcctatgcagagcacaagctccaattctgggcagtcaccgcagaaaacgagccctcagctgggctgctgtctggctacccctttcagtgcttgggctttactcctgagcatcaacgggacttcattgcccgggatttggggccaacactggccaacagcacccaccacaatgtaagactcctcattctggatgaccagaggctgctgctccctcattgggccaaggtggtgttgacagacccagaagctgccaaatatgttcatggcatcgctgtccactggtacctggattttttggcccctgcaaaggctactctgggagagacccacagactcttccccaataccatgctgtttgcatcagaagcctgcgtggggagcaaattctgggagcagtctgttaggctgggttcctgggatcggggcatgcaatattcccatagtataataactaacctcctctaccacgtggtaggatggacagactggaatctggctttgaacccagaaggaggccccaattgggtgcgcaactttgttgacagccccatcattgtggatatcacaaaggacaccttctacaaacagcctatgttctatcatctggggcactttagcaagttcattccagagggttcccagagagtaggcttggttgcctcacagaagaatgatctggatgctgtggcactcctgcatcctgacgggagtgcagtggtggtagtactgaacaggtctagcaaagatgttcccttgactatcaaagacccagctgtgggctttctggaaaccatttcccctggatactctatccacacctatctctggagaagacagtaatga

SEQ ID NO: 224 - protein, 536 aa, synthetic construct
  REGION 1..536: note = Variant of B-Glucocerebrosidase
MEFSSPSREECPKPLSRVSIMAGSLTGLLLLQAVSWASGARPCIPKSFGYSSVVCVCNATYCDSLDPVTLPALGTFSRYESTRSGRRMELSMGPIQANHTGTGLLLTLQPEQKFQKVKGFGGAMTDAAALNILALSPPAQNLLLKSYFSEEGIGYNIIRVPMASCDFSIRTYTYADTPDDFQLHNFSLPEEDTKLKIPLIHRALQLSQRPVSLFASPWTSPTWLKTNGAVNGKGSLKGQPGDIYHQTWARYFVKFLDAYAEHKLQFWAVTAENEPSAGLLSGYPFQCLGFTPEHQRDFIARDLGPTLANSTHHNVRLLILDDQRLLLPHWAKVVLTDPEAAKYVHGIAVHWYLDFLAPAKATLGETHRLFPNTMLFASEACVGSKFWEQSVRLGSWDRGMQYSHSIITNLLYHVVGWTDWNLALNPEGGPNWVRNFVDSPIIVDITKDTFYKQPMFYHLGHFSKFIPEGSQRVGLVASQKNDLDAVALLHPDGSAVVVVLNRSSKDVPLTIKDPAVGFLETISPGYSIHTYLWRRQ

SEQ ID NO: 225 - DNA, 1614 bp, synthetic construct
  misc_feature 1..1614: note = Variant of B-Glucocerebrosidase
  source 1..1614: mol_type = other DNA
atggagttttcttctcctagtagagaagaatgccccaagccactgagcagggtgagcatcatggctggatccctcacagggctgcttcttttgcaggcagtctcatgggcctctggagccaggccctgtattcccaagtcattcggctactcctcagtggtgtgtgtatgcaatgccacctattgtgacagtttcgatcctcccactctccctgctctgggtaccttctcccggtatgagagcacaagaagtggaagacgcatggagctctcaatgggccctatacaggctaaccacactgggacaggtctgctgctgaccctccaacctgaacagaagtttcagaaagtcaagggatttggaggagccatgactgatgcagcagcactcaacatcttggccctgtctccaccagcccagaatctgctgttgaagtcctacttctcagaggaggggattggctacaacatcatccgggttcccatggctagctgtgacttctccattaggacctatacatacgctgacacccccgatgattttcagctccataatttcagtctccctgaagaagacaccaaaatgaagatacctctgattcacagagccttgcaactgtcccaaaggccagtgagcctcttcgcttctccctggactagtcctacatggctgaagactaatggtgctctgaatgggaaaggctccctgaaaggacagccaggtgacatatatcatcagacatgggcccgctactttgtgaaattccttgatgcctatgcagagcacaagctccaattctgggcagtcaccgcagaaaacgagccctcagctgggctgctgtctggctacccctttcagtgcttgggctttactcctgagcatcaacgggacttcattgcccgggatttggggccaacactggccaacagcacccaccacaatgtaagactcctcatgctggatgaccagaggctgctgctccctcattgggccaaggtggtgttgacagacccagaagctgccaaatatgttcatggcatcgctgtccactggtacctggattttttggcccctgcaaaggctactctgggagagacccacagactcttccccaataccatgctgtttgcatcagaagcctgcgtggggagcaaattctgggagcagtctgttaggctgggttcctgggatcggggcatgcaatattcccatagtataataactaacctcctctaccacgtggtaggatggacagactggaatctggctttgaacccagaaggaggccccaattgggtgcgcaactttgttgacagccccatcattgtggatatcacaaaggacaccttctacaaacagcctatgttctatcatctggggcactttagcaagttcattccagagggttcccagagagtaggcttggttgcctcacagaagaatgatctggatgctgtggcactcctgcatcctgacgggagtgcagtggtggtagtactgaacaggtctagcaaagatgttcccttgactatcaaagacccagctgtgggctttctggaaaccatttcccctggatactctatccacacctatctctggagaagacagtaatga

SEQ ID NO: 226 - protein, 536 aa, synthetic construct
  REGION 1..536: note = Variant of B-Glucocerebrosidase
MEFSSPSREECPKPLSRVSIMAGSLTGLLLLQAVSWASGARPCIPKSFGYSSVVCVCNATYCDSFDPPTLPALGTFSRYESTRSGRRMELSMGPIQANHTGTGLLLTLQPEQKFQKVKGFGGAMTDAAALNILALSPPAQNLLLKSYFSEEGIGYNIIRVPMASCDFSIRTYTYADTPDDFQLHNFSLPEEDTKMKIPLIHRALQLSQRPVSLFASPWTSPTWLKTNGALNGKGSLKGQPGDIYHQTWARYFVKFLDAYAEHKLQFWAVTAENEPSAGLLSGYPFQCLGFTPEHQRDFIARDLGPTLANSTHHNVRLLMLDDQRLLLPHWAKVVLTDPEAAKYVHGIAVHWYLDFLAPAKATLGETHRLFPNTMLFASEACVGSKFWEQSVRLGSWDRGMQYSHSIITNLLYHVVGWTDWNLALNPEGGPNWVRNFVDSPIIVDITKDTFYKQPMFYHLGHFSKFIPEGSQRVGLVASQKNDLDAVALLHPDGSAVVVVLNRSSKDVPLTIKDPAVGFLETISPGYSIHTYLWRRQ

SEQ ID NO: 227 - DNA, 1614 bp, synthetic construct
  misc_feature 1..1614: note = Variant of B-Glucocerebrosidase
  source 1..1614: mol_type = other DNA
atggagttttcttctcctagtagagaagaatgccccaagccactgagcagggtgagcatcatggctggatccctcacagggctgcttcttttgcaggcagtctcatgggcctctggagccaggccctgtattcccaagtcattcggctactcctcagtggtgtgtgtatgcaatgccacctattgtgacagtctcgatcctcccactctccctgctctgggtaccttctcccggtatgagagcacaagaagtggaagacgcatggagctctcaatgggccctatacaggctaaccacactgggacaggtctgctgctgaccctccaacctgaacagaagtttcagaaagtcaagggatttggaggagccatgactgatgcagcagcactcaacatcttggccctgtctccaccagcccagaatctgctgttgaagtcctacttctcagaggaggggattggctacaacatcatccgggttcccatggctagctgtgacttctccattaggacctatacatacgctgacacccccgatgattttcagctccataatttcagtctccctgaagaagacaccaaactgaagatacctctgattcacagagccttgcaactgtcccaaaggccagtgagcctcttcgcttctccctggactagtcctacatggctgaagactaatggtgctctgaatgggaaaggctccctgaaaggacagccaggtgacatatatcatcagacatgggcccgctactttgtgaaattccttgatgcctatgcagagcacaagctccaattctgggcagtcaccgcagaaaacgagccctcagctgggctgctgtctggctacccctttcagtgcttgggctttactcctgagcatcaacgggacttcattgcccgggatttggggccaacactggccaacagcacccaccacaatgtaagactcctcatgctggatgaccagaggctgctgctccctcattgggccaaggtggtgttgacagacccagaagctgccaaatatgttcatggcatcgctgtccactggtacctggattttttggcccctgcaaaggctactctgggagagacccacagactcttccccaataccatgctgtttgcatcagaagcctgcgtggggagcaaattctgggagcagtctgttaggctgggttcctgggatcggggcatgcaatattcccatagtataataactaacctcctctaccacgtggtaggatggacagactggaatctggctttgaacccagaaggaggccccaattgggtgcgcaactttgttgacagccccatcattgtggatatcacaaaggacaccttctacaaacagcctatgttctatcatctggggcactttagcaagttcattccagagggttcccagagagtaggcttggttgcctcacagaagaatgatctggatgctgtggcactcctgcatcctgacgggagtgcagtggtggtagtactgaacaggtctagcaaagatgttcccttgactatcaaagacccagctgtgggctttctggaaaccatttcccctggatactctatccacacctatctctggagaagacagtaatga

SEQ ID NO: 228 - protein, 536 aa, synthetic construct
  REGION 1..536: note = Variant of B-Glucocerebrosidase
MEFSSPSREECPKPLSRVSIMAGSLTGLLLLQAVSWASGARPCIPKSFGYSSVVCVCNATYCDSLDPPTLPALGTFSRYESTRSGRRMELSMGPIQANHTGTGLLLTLQPEQKFQKVKGFGGAMTDAAALNILALSPPAQNLLLKSYFSEEGIGYNIIRVPMASCDFSIRTYTYADTPDDFQLHNFSLPEEDTKLKIPLIHRALQLSQRPVSLFASPWTSPTWLKTNGALNGKGSLKGQPGDIYHQTWARYFVKFLDAYAEHKLQFWAVTAENEPSAGLLSGYPFQCLGFTPEHQRDFIARDLGPTLANSTHHNVRLLMLDDQRLLLPHWAKVVLTDPEAAKYVHGIAVHWYLDFLAPAKATLGETHRLFPNTMLFASEACVGSKFWEQSVRLGSWDRGMQYSHSIITNLLYHVVGWTDWNLALNPEGGPNWVRNFVDSPIIVDITKDTFYKQPMFYHLGHFSKFIPEGSQRVGLVASQKNDLDAVALLHPDGSAVVVVLNRSSKDVPLTIKDPAVGFLETISPGYSIHTYLWRRQ

SEQ ID NO: 229 - DNA, 1614 bp, synthetic construct
  misc_feature 1..1614: note = Variant of B-Glucocerebrosidase
  source 1..1614: mol_type = other DNA
atggagttttcttctcctagtagagaagaatgccccaagccactgagcagggtgagcatcatggctggatccctcacagggctgcttcttttgcaggcagtctcatgggcctctggagccaggccctgtattcccaagtcattcggctactcctcagtggtgtgtgtatgcaatgccacctattgtgacagtttcgatcctccaactctccctgctctgggtaccttctcccggtatgagagcacaagaagtggaagacgcatggagctctcaatgggccctatacaggctaaccacactgggacaggtctgctgctgaccctccaacctgaacagaagtttcagaaagtcaagggatttggaggagccatgactgatgcagcagcactcaacatcttggccctgtctccaccagcccaggacctgctgttgaagtcctacttctcagaggaggggattgggtacaacatcatccgggttcccatggctagctgtgacttctccattaggacctatacatacgctgacacccccgatgattttcagctccataatttcagtctccctgaagaagacaccaaactgaagatacctctgattcacagagccttgcaactgtcccaaaggccagtgagcctcttcgcttctccctggactagtcctacatggctgaagactaatggtgctgtgaatgggaaaggctccctgaaaggacagccaggtgacatatatcatcagacatgggcccgctactttgtgaaattccttgatgcctatgcagagcacaagctccaattctgggcagtcaccgcagaaaacgagccctcagctgggctgctgtctggctacccctttcagtgcttgggctttactcctgagcatcaacgggacttcattgcccgggatttggggccaacactggccaacagcacccaccacaatgtaagactcctcattctggatgaccagaggctgctgctccctcattgggccaaggtggtgttgacagacccagaagctgccaaatatgttcatggcatcgctgtccactggtacctggattttttggcccctgcaaaggctactctgggagagacccacagactcttccccaataccatgctgtttgcatcagaagcctgcgtggggagcaaattctgggagcagtctgttaggctgggttcctgggatcggggcatgcaatattcccatagtataataactaacctcctctaccacgtggtaggatggacagactggaatctggctttgaacccagaaggaggccccaattgggtgcgcaactttgttgacagccccatcattgtggatatcacaaaggacaccttctacaaacagcctatgttctatcatctggggcactttagcaagttcattccagagggttcccagagagtaggcttggttgcctcacagaagaatgatctggatgctgtggcactcctgcatcctgacgggagtgcagtggtggtagtactgaacaggtctagcaaagatgttcccttgactatcaaagacccagctgtgggctttctggaaaccatttcccctggatactctatccacacctatctctggagaagacagtaatga

SEQ ID NO: 230 - protein, 536 aa, synthetic construct
  REGION 1..536: note = Variant of B-Glucocerebrosidase
MEFSSPSREECPKPLSRVSIMAGSLTGLLLLQAVSWASGARPCIPKSFGYSSVVCVCNATYCDSFDPPTLPALGTFSRYESTRSGRRMELSMGPIQANHTGTGLLLTLQPEQKFQKVKGFGGAMTDAAALNILALSPPAQDLLLKSYFSEEGIGYNIIRVPMASCDFSIRTYTYADTPDDFQLHNFSLPEEDTKLKIPLIHRALQLSQRPVSLFASPWTSPTWLKTNGAVNGKGSLKGQPGDIYHQTWARYFVKFLDAYAEHKLQFWAVTAENEPSAGLLSGYPFQCLGFTPEHQRDFIARDLGPTLANSTHHNVRLLILDDQRLLLPHWAKVVLTDPEAAKYVHGIAVHWYLDFLAPAKATLGETHRLFPNTMLFASEACVGSKFWEQSVRLGSWDRGMQYSHSIITNLLYHVVGWTDWNLALNPEGGPNWVRNFVDSPIIVDITKDTFYKQPMFYHLGHFSKFIPEGSQRVGLVASQKNDLDAVALLHPDGSAVVVVLNRSSKDVPLTIKDPAVGFLETISPGYSIHTYLWRRQ

SEQ ID NO: 231 - DNA, 1614 bp, synthetic construct
  misc_feature 1..1614: note = Variant of B-Glucocerebrosidase
  source 1..1614: mol_type = other DNA
atggagttttcttctcctagtagagaagaatgccccaagccactgagcagggtgagcatcatggctggatccctcacagggctgcttcttttgcaggcagtctcatgggcctctggagccaggccctgtattcccaagtcattcggctactcctcagtggtgtgtgtatgcaatgccacctattgtgacagtttcgatcctcccactctccctgctctgggtaccttctcccggtatgagagcacaagaagtggaagacgcatggagctctcaatgggccctatacaggctaaccacactgggacaggtctgctgctgaccctccaacctgaacagaagtttcagaaagtcaagggatttggaggagccatgactgatgcagcagcactcaacatcttggccctgtctccaccagcccagaatctgctgttgaagtcctacttctcagaggaggggattgagtacaacatcatccgggttcccatggctagctgtgacttctccattaggacctatacatacgctgacacccccgatgattttcagctccataatttcagtctccctgaagaagacaccaaactgaagatacctctgattcacagagccttgcaactgtcccaaaggccagtgagcctcttcgcttctccctggactagtcctacatggctgaagactaatggtgctgttaatgggaaaggctccctgaaaggacagccaggtgacatatatcatcagacatgggcccgctactttgtgaaattccttgatgcctatgcagagcacaagctccaattctgggcagtcaccgcagaaaacgagccctcagctgggctgctgtctggctacccctttcagtgcttgggctttactcctgagcatcaacgggacttcattgcccgggatttggggccaacactggccaacagcacccaccacaatgtaagactcctcatgctggatgaccagaggctgctgctccctcattgggccaaggtggtgttggcagacccagaagctgccaaatatgttcatggcatcgctgtccactggtacctggattttttggcccctgcaaaggctactctgggagagacccacagactcttccccaataccatgctgtttgcatcagaagcctgcgtggggagcaaattctgggagcagtctgttaggctgggttcctgggatcggggcatgcaatattcccatagtataataactaacctcctctaccacgtggtaggatggacagactggaatctggctttgaacccagaaggaggccccaattgggtgcgcaactttgttgacagccccatcattgtggatatcacaaaggacaccttctacaaacagcctatgttctatcatctggggcactttagcaagttcattccagagggttcccagagagtaggcttggttgcctcacagaagaatgatctggatgctgtggcactcctgcatcctgacgggagtgcagtggtggtagtactgaacaggtctagcaaagatgttcccttgactatcaaagacccagctgtgggctttctggaaaccatttcccctggatactctatccacacctatctctggagaagacagtaatga

SEQ ID NO: 232 - protein, 536 aa, synthetic construct
  REGION 1..536: note = Variant of B-Glucocerebrosidase
MEFSSPSREECPKPLSRVSIMAGSLTGLLLLQAVSWASGARPCIPKSFGYSSVVCVCNATYCDSFDPPTLPALGTFSRYESTRSGRRMELSMGPIQANHTGTGLLLTLQPEQKFQKVKGFGGAMTDAAALNILALSPPAQNLLLKSYFSEEGIEYNIIRVPMASCDFSIRTYTYADTPDDFQLHNFSLPEEDTKLKIPLIHRALQLSQRPVSLFASPWTSPTWLKTNGAVNGKGSLKGQPGDIYHQTWARYFVKFLDAYAEHKLQFWAVTAENEPSAGLLSGYPFQCLGFTPEHQRDFIARDLGPTLANSTHHNVRLLMLDDQRLLLPHWAKVVLADPEAAKYVHGIAVHWYLDFLAPAKATLGETHRLFPNTMLFASEACVGSKFWEQSVRLGSWDRGMQYSHSIITNLLYHVVGWTDWNLALNPEGGPNWVRNFVDSPIIVDITKDTFYKQPMFYHLGHFSKFIPEGSQRVGLVASQKNDLDAVALLHPDGSAVVVVLNRSSKDVPLTIKDPAVGFLETISPGYSIHTYLWRRQ

SEQ ID NO: 233 - DNA, 1614 bp, synthetic construct
  misc_feature 1..1614: note = Variant of B-Glucocerebrosidase
  source 1..1614: mol_type = other DNA
atggagttttcttctcctagtagagaagaatgccccaagccactgagcagggtgagcatcatggctggatccctcacagggctgcttcttttgcaggcagtctcatgggcctctggagccaggccctgtattcccaagtcattcggctactcctcagtggtgtgtgtatgcaatgccacctattgtgacagtttcgatcctctcactctccctgctctgggtaccttctcccggtatgagagcacaagaagtggaagacgcatggagctctcaatgggccctatacaggctaaccacactgggacaggtctgctgctgaccctccaacctgaacagaagtttcagaaagtcaagggatttggaggagccatgactgatgcagcagcactcaacatcttggccctgtctccaccagcccagaatctgctgttgaagtcctacttctcagaggaggggattggctacaacatcatccgggttcccatggctagctgtgacttctccattaggacctatacatacgctgacacccccgatgattttcagctccataatttcagtctccctgaagaagacaccaaactgaagatacctctgattcacagagccttgcaactgtcccaaaggccagtgagcctcttcgcttctccctggactagtcctacatggctgaagactaatggtgctgttaatgggaaaggctccctgaaaggacagccaggtgacatatatcatcagacatgggcccgctactttgtgaaattccttgatgcctatgcagagcacaagctccaattctgggcagtcaccgcagaaaacgagccctcagctgggctgctgtctggctacccctttcagtgcttgggctttactcctgagcatcaacgggacttcattgcccgggatttggggccaacactggccaacagcacccaccacaatgtaagactcctcattctggatgaccagaggctgctgctccctcattgggccaaggtggtgttgacagacccagaagctgccaaatatgttcatggcatcgctgtccactggtacctggattttttggcccctgcaaaggctactctgggagagacccacagactcttccccaataccatgctgtttgcatcagaagcctgcgtggggagcaaattctgggagcagtctgttaggctgggttcctgggatcggggcatgcaatattcccatagtataataactaacctcctctaccacgtggtaggatggacagactggaatctggctttgaacccagaaggaggccccaattgggtgcgcaactttgttgacagccccatcattgtggatatcacaaaggacaccttctacaaacagcctatgttctatcatctggggcactttagcaagttcattccagagggttcccagagagtaggcttggttgcctcacagaagaatgatctggatgctgtggcactcctgcatcctgacgggagtgcagtggtggtagtactgaacaggtctagcaaagatgttcccttgactatcaaagacccagctgtgggctttctggaaaccatttcccctggatactctatccacacctatctctggagaagacagtaatga

SEQ ID NO: 234 - protein, 536 aa, synthetic construct
  REGION 1..536: note = Variant of B-Glucocerebrosidase
MEFSSPSREECPKPLSRVSIMAGSLTGLLLLQAVSWASGARPCIPKSFGYSSVVCVCNATYCDSFDPLTLPALGTFSRYESTRSGRRMELSMGPIQANHTGTGLLLTLQPEQKFQKVKGFGGAMTDAAALNILALSPPAQNLLLKSYFSEEGIGYNIIRVPMASCDFSIRTYTYADTPDDFQLHNFSLPEEDTKLKIPLIHRALQLSQRPVSLFASPWTSPTWLKTNGAVNGKGSLKGQPGDIYHQTWARYFVKFLDAYAEHKLQFWAVTAENEPSAGLLSGYPFQCLGFTPEHQRDFIARDLGPTLANSTHHNVRLLILDDQRLLLPHWAKVVLTDPEAAKYVHGIAVHWYLDFLAPAKATLGETHRLFPNTMLFASEACVGSKFWEQSVRLGSWDRGMQYSHSIITNLLYHVVGWTDWNLALNPEGGPNWVRNFVDSPIIVDITKDTFYKQPMFYHLGHFSKFIPEGSQRVGLVASQKNDLDAVALLHPDGSAVVVVLNRSSKDVPLTIKDPAVGFLETISPGYSIHTYLWRRQ

SEQ ID NO: 235 - DNA, 1614 bp, synthetic construct
  misc_feature 1..1614: note = Variant of B-Glucocerebrosidase
  source 1..1614: mol_type = other DNA
atggagttttcttctcctagtagagaagaatgccccaagccactgagcagggtgagcatcatggctggatccctcacagggctgcttcttttgcaggcagtctcatgggcctctggagccaggccctgtattcccaagtcattcggctactcctcagtggtgtgtgtatgcaatgccacctattgtgacagtttcgatcctgtcactctccctgctctgggtaccttctcccggtatgagagcacaagaagtggaagacgcatggagctctcaatgggccctatacaggctaaccacactgggacaggtctgctgctgaccctccaacctgaacagaagtttcagaaagtcaagggatttggaggagccatgactgatgcagcagcactcaacatcttggccctgtctccaccagcccagaacctgctgttgaagtcctacttctcagaggaggggattgagtacaacatcatccgggttcccatggctagctgtgacttctccattaggacctatacatacgctgacacccccgatgattttcagctccataatttcagtctccctgaagaagacaccaaactgaagatacctctgattcacagagccttgcaactgtcccaaaggccagtgagcctcttcgcttctccctggactagtcctacatggctgaagactaatggtgctgtgaatgggaaaggctccctgaaaggacagccaggtgacatatatcatcagacatgggcccgctactttgtgaaattccttgatgcctatgcagagcacaagctccaattctgggcagtcaccgcagaaaacgagccctcagctgggctgctgtctggctacccctttcagtgcttgggctttactcctgagcatcaacgggacttcattgcccgggatttggggccaacactggccaacagcacccaccacaatgtaagactcctcatgctggatgaccagaggctgctgctccctcattgggccaaggtggtgttgacagacccagaagctgccaaatatgttcatggcatcgctgtccactggtacctggattttttggcccctgcaaaggctactctgggagagacccacagactcttccccaataccatgctgtttgcatcagaagcctgcgtggggagcaaattctgggagcagtctgttaggctgggttcctgggatcggggcatgcaatattcccatagtataataactaacctcctctaccacgtggtaggatggacagactggaatctggctttgaacccagaaggaggccccaattgggtgcgcaactttgttgacagccccatcattgtggatatcacaaaggacaccttctacaaacagcctatgttctatcatctggggcactttagcaagttcattccagagggttcccagagagtaggcttggttgcctcacagaagaatgatctggatgctgtggcactcctgcatcctgacgggagtgcagtggtggtagtactgaacaggtctagcaaagatgttcccttgactatcaaagacccagctgtgggctttctggaaaccatttcccctggatactctatccacacctatctctggagaagacagtaatga

SEQ ID NO: 236 - protein, 536 aa, synthetic construct
  REGION 1..536: note = Variant of B-Glucocerebrosidase
MEFSSPSREECPKPLSRVSIMAGSLTGLLLLQAVSWASGARPCIPKSFGYSSVVCVCNATYCDSFDPVTLPALGTFSRYESTRSGRRMELSMGPIQANHTGTGLLLTLQPEQKFQKVKGFGGAMTDAAALNILALSPPAQNLLLKSYFSEEGIEYNIIRVPMASCDFSIRTYTYADTPDDFQLHNFSLPEEDTKLKIPLIHRALQLSQRPVSLFASPWTSPTWLKTNGAVNGKGSLKGQPGDIYHQTWARYFVKFLDAYAEHKLQFWAVTAENEPSAGLLSGYPFQCLGFTPEHQRDFIARDLGPTLANSTHHNVRLLMLDDQRLLLPHWAKVVLTDPEAAKYVHGIAVHWYLDFLAPAKATLGETHRLFPNTMLFASEACVGSKFWEQSVRLGSWDRGMQYSHSIITNLLYHVVGWTDWNLALNPEGGPNWVRNFVDSPIIVDITKDTFYKQPMFYHLGHFSKFIPEGSQRVGLVASQKNDLDAVALLHPDGSAVVVVLNRSSKDVPLTIKDPAVGFLETISPGYSIHTYLWRRQ

SEQ ID NO: 237 - DNA, 1614 bp, synthetic construct
  misc_feature 1..1614: note = Variant of B-Glucocerebrosidase
  source 1..1614: mol_type = other DNA
atggagttttcttctcctagtagagaagaatgccccaagccactgagcagggtgagcatcatggctggatccctcacagggctgcttcttttgcaggcagtctcatgggcctctggagccaggccctgtattcccaagtcattcggctactcctcagtggtgtgtgtatgcaatgccacctattgtgacagtttcgatcctgtcactctccctgctctgggtaccttctcccggtatgagagcacaagaagtggaagacgcatggagctctcaatgggccctatacaggctaaccacactgggacaggtctgctgctgaccctccaacctgaacagaagtttcagaaagtcaagggatttggaggagccatgactgatgcagcagcactcaacatcttggccctgtctccaccagcccagaacctgctgttgaagtcctacttctcagaggaggggattgggtacaacatcatccgggttcccatggctagctgtgacttctccattaggacctatacatacgctgacacccccgatgattttcagctccataatttcagtctccctgaagaagacaccaaaatgaagatacctctgattcacagagccttgcaactgtcccaaaggccagtgagcctcttcgcttctccctggactagtcctacatggctgaagactaatggtgctctgaatgggaaaggctccctgaaaggacagccaggtgacatatatcatcagacatgggcccgctactttgtgaaattccttgatgcctatgcagagcacaagctccaattctgggcagtcaccgcagaaaacgagccctcagctgggctgctgtctggctacccctttcagtgcttgggctttactcctgagcatcaacgggacttcattgcccgggatttggggccaacactggccaacagcacccaccacaatgtaagactcctcattctggatgaccagaggctgctgctccctcattgggccaaggtggtgttggcagacccagaagctgccaaatatgttcatggcatcgctgtccactggtacctggattttttggcccctgcaaaggctactctgggagagacccacagactcttccccaataccatgctgtttgcatcagaagcctgcgtggggagcaaattctgggagcagtctgttaggctgggttcctgggatcggggcatgcaatattcccatagtataataactaacctcctctaccacgtggtaggatggacagactggaatctggctttgaacccagaaggaggccccaattgggtgcgcaactttgttgacagccccatcattgtggatatcacaaaggacaccttctacaaacagcctatgttctatcatctggggcactttagcaagttcattccagagggttcccagagagtaggcttggttgcctcacagaagaatgatctggatgctgtggcactcctgcatcctgacgggagtgcagtggtggtagtactgaacaggtctagcaaagatgttcccttgactatcaaagacccagctgtgggctttctggaaaccatttcccctggatactctatccacacctatctctggagaagacagtaatga

SEQ ID NO: 238 - protein, 536 aa, synthetic construct
  REGION 1..536: note = Variant of B-Glucocerebrosidase
MEFSSPSREECPKPLSRVSIMAGSLTGLLLLQAVSWASGARPCIPKSFGYSSVVCVCNATYCDSFDPVTLPALGTFSRYESTRSGRRMELSMGPIQANHTGTGLLLTLQPEQKFQKVKGFGGAMTDAAALNILALSPPAQNLLLKSYFSEEGIGYNIIRVPMASCDFSIRTYTYADTPDDFQLHNFSLPEEDTKMKIPLIHRALQLSQRPVSLFASPWTSPTWLKTNGALNGKGSLKGQPGDIYHQTWARYFVKFLDAYAEHKLQFWAVTAENEPSAGLLSGYPFQCLGFTPEHQRDFIARDLGPTLANSTHHNVRLLILDDQRLLLPHWAKVVLADPEAAKYVHGIAVHWYLDFLAPAKATLGETHRLFPNTMLFASEACVGSKFWEQSVRLGSWDRGMQYSHSIITNLLYHVVGWTDWNLALNPEGGPNWVRNFVDSPIIVDITKDTFYKQPMFYHLGHFSKFIPEGSQRVGLVASQKNDLDAVALLHPDGSAVVVVLNRSSKDVPLTIKDPAVGFLETISPGYSIHTYLWRRQ

SEQ ID NO: 239 - DNA, 1614 bp, synthetic construct
  misc_feature 1..1614: note = Variant of B-Glucocerebrosidase
  source 1..1614: mol_type = other DNA
atggagttttcttctcctagtagagaagaatgccccaagccactgagcagggtgagcatcatggctggatccctcacagggctgcttcttttgcaggcagtctcatgggcctctggagccaggccctgtattcccaagtcattcggctactcctcagtggtgtgtgtatgcaatgccacctattgtgacagtttcgatcctgtcactctccctgctctgggtaccttctcccggtatgagagcacaagaagtggaagacgcatggagctctcaatgggccctatacaggctaaccgcactgggacaggtctgctgctgaccctccaacctgaacagaagtttcagaaagtcaagggatttggaggagccatgactgatgcagcagcactcaacatcttggccctgtctccaccagcccagaacctgctgttgaagtcctacttctcagaggaggggattgggtacaacatcatccgggtacccatggctagctgtgacttctccattaggacctatacatacgctgacacccccgatgattttcagctccataatttcagtctccctgaagaagacaccaaaatgaagatacctctgattcacagagccttgcaactgtcccaaaggccagtgagcctcttcgcttctccctggactagtcctacatggctgaagactaatggtgctctgaatgggaaaggctccctgaaaggacagccaggtgacatatatcatcagacatgggcccgctactttgtgaaattccttgatgcctatgcagagcacaagctccaattctgggcagtcaccgcagaaaacgagccctcagctgggctgctgtctggctacccctttcagtgcttgggctttactcctgagcatcaacgggacttcattgcccgggatttggggccaacactggccaacagcacccaccacaatgtaagactcctcattctggatgaccagaggctgctgctccctcattgggccaaggtggtgttgacagacccagaagctgccaaatatgttcatggcatcgctgtccactggtacctggattttttggcccctgcaaaggctactctgggagagacccacagactcttccccaataccatgctgtttgcatcagaagcctgcgtggggagcaaattctgggagcagtctgttaggctgggttcctgggatcggggcatgcaatattcccatagtataataactaacctcctctaccacgtggtaggatggacagactggaatctggctttgaacccagaaggaggccccaattgggtgcgcaactttgttgacagccccatcattgtggatatcacaaaggacaccttctacaaacagcctatgttctatcatctggggcactttagcaagttcattccagagggttcccagagagtaggcttggttgcctcacagaagaatgatctggatgctgtggcactcctgcatcctgacgggagtgcagtggtggtagtactgaacaggtctagcaaagatgttcccttgactatcaaagacccagctgtgggctttctggaaaccatttcccctggatactctatccacacctatctctggagaagacagtaatga

SEQ ID NO: 240 - protein, 536 aa, synthetic construct
  REGION 1..536: note = Variant of B-Glucocerebrosidase
MEFSSPSREECPKPLSRVSIMAGSLTGLLLLQAVSWASGARPCIPKSFGYSSVVCVCNATYCDSFDPVTLPALGTFSRYESTRSGRRMELSMGPIQANRTGTGLLLTLQPEQKFQKVKGFGGAMTDAAALNILALSPPAQNLLLKSYFSEEGIGYNIIRVPMASCDFSIRTYTYADTPDDFQLHNFSLPEEDTKMKIPLIHRALQLSQRPVSLFASPWTSPTWLKTNGALNGKGSLKGQPGDIYHQTWARYFVKFLDAYAEHKLQFWAVTAENEPSAGLLSGYPFQCLGFTPEHQRDFIARDLGPTLANSTHHNVRLLILDDQRLLLPHWAKVVLTDPEAAKYVHGIAVHWYLDFLAPAKATLGETHRLFPNTMLFASEACVGSKFWEQSVRLGSWDRGMQYSHSIITNLLYHVVGWTDWNLALNPEGGPNWVRNFVDSPIIVDITKDTFYKQPMFYHLGHFSKFIPEGSQRVGLVASQKNDLDAVALLHPDGSAVVVVLNRSSKDVPLTIKDPAVGFLETISPGYSIHTYLWRRQ

SEQ ID NO: 241 - DNA, 1614 bp, synthetic construct
  misc_feature 1..1614: note = Variant of B-Glucocerebrosidase
  source 1..1614: mol_type = other DNA
atggagttttcttctcctagtagagaagaatgccccaagccactgagcagggtgagcatcatggctggatccctcacagggctgcttcttttgcaggcagtctcatgggcctctggagccaggccctgtattcccaagtcattcggctactcctcagtggtgtgtgtatgcaatgccacctattgtgacagtttcgatcctgtcactctccctgctctgggtaccttctcccggtatgagagcacaagaagtggaagacgcatggagctctcaatgggccctatacaggctaaccacactgggacaggtctgctgctgaccctccaacctgaacagaagtttcagaaagtcaagggatttggaggagccatgactgatgcagcagcactcaacatcttggccctgtctccaccagcccagaacctgctgttgaagtcctacttctcagaggaggggattgggtacaacatcatccgggttcccatggctagctgtgacttctccattaggacctatacatacgctgacacccccgatgattttcagctccataatttcagtctccctgaagaagacaccaaaatgaagatacctctgattcacagagccttgcaactgtcccaaaggccagtgagcctcttcgcttctccctggactagtcctacatggctgaagactaatggtgctgttaatgggaaaggctccctgaaaggacagccaggtgacatatatcatcagacatgggcccgctactttgtgaaattccttgatgcctatgcagagcacaagctccaattctgggcagtcaccgcagaaaacgagccctcagctgggctgctgtctggctacccctttcagtgcttgggctttactcctgagcatcaacgggacttcattgcccgggatttggggccaacactggccaacagcacccaccacaatgtaagactcctcatgctggatgaccagaggctgctgctccctcattgggccaaggtggtgttgacagacccagaagctgccaaatatgttcatggcatcgctgtccactggtacctggattttttggcccctgcaaaggctactctgggagagacccacagactcttccccaataccatgctgtttgcatcagaagcctgcgtggggagcaaattctgggagcagtctgttaggctgggttcctgggatcggggcatgcaatattcccatagtataataactaacctcctctaccacgtggtaggatggacagactggaatctggctttgaacccagaaggaggccccaattgggtgcgcaactttgttgacagccccatcattgtggatatcacaaaggacaccttctacaaacagcctatgttctatcatctggggcactttagcaagttcattccagagggttcccagagagtaggcttggttgcctcacagaagaatgatctggatgctgtggcactcctgcatcctgacgggagtgcagtggtggtagtactgaacaggtctagcaaagatgttcccttgactatcaaagacccagctgtgggctttctggaaaccatttcccctggatactctatccacacctatctctggagaagacagtaatga

SEQ ID NO: 242 - protein, 536 aa, synthetic construct
  REGION 1..536: note = Variant of B-Glucocerebrosidase
MEFSSPSREECPKPLSRVSIMAGSLTGLLLLQAVSWASGARPCIPKSFGYSSVVCVCNATYCDSFDPVTLPALGTFSRYESTRSGRRMELSMGPIQANHTGTGLLLTLQPEQKFQKVKGFGGAMTDAAALNILALSPPAQNLLLKSYFSEEGIGYNIIRVPMASCDFSIRTYTYADTPDDFQLHNFSLPEEDTKMKIPLIHRALQLSQRPVSLFASPWTSPTWLKTNGAVNGKGSLKGQPGDIYHQTWARYFVKFLDAYAEHKLQFWAVTAENEPSAGLLSGYPFQCLGFTPEHQRDFIARDLGPTLANSTHHNVRLLMLDDQRLLLPHWAKVVLTDPEAAKYVHGIAVHWYLDFLAPAKATLGETHRLFPNTMLFASEACVGSKFWEQSVRLGSWDRGMQYSHSIITNLLYHVVGWTDWNLALNPEGGPNWVRNFVDSPIIVDITKDTFYKQPMFYHLGHFSKFIPEGSQRVGLVASQKNDLDAVALLHPDGSAVVVVLNRSSKDVPLTIKDPAVGFLETISPGYSIHTYLWRRQ

SEQ ID NO: 243 - DNA, 1614 bp, synthetic construct
  misc_feature 1..1614: note = Variant of B-Glucocerebrosidase
  source 1..1614: mol_type = other DNA
atggagttttcttctcctagtagagaagaatgccccaagccactgagcagggtgagcatcatggctggatccctcacagggctgcttcttttgcaggcagtctcatgggcctctggagccaggccctgtattcccaagtcattcggctactcctcagtggtgtgtgtatgcaatgccacctattgtgacagtctcgatcctgtcactctccctgctctgggtaccttctcccggtatgagagcacaagaagtggaagacgcatggagctctcaatgggccctatacaggctaaccacactgggacaggtctgctgctgaccctccaacctgaacagaagtttcagaaagtcaagggatttggaggagccatgactgatgcagcagcactcaacatcttggccctgtctccaccagcccagaatctgctgttgaagtcctacttctcagaggaggggattggctacaacatcatccgggttcccatggctagctgtgacttctccattaggacctatacatacgctgacacccccgatgattttcagctccataatttcagtctccctgaagaagacaccaaactgaagatacctctgattcacagagccttgcaactgtcccaaaggccagtgagcctcttcgcttctccctggactagtcctacatggctgaagactaatggtgctgttaatgggaaaggctccctgaaaggacagccaggtgacatatatcatcagacatgggcccgctactttgtgaaattccttgatgcctatgcagagcacaagctccaattctgggcagtcaccgcagaaaacgagccctcagctgggctgctgtctggctacccctttcagtgcttgggctttactcctgagcatcaacgggacttcattgcccgggatttggggccaacactggccaacagcacccaccacaatgtaagactcctcatgctggatgaccagaggctgctgctccctcattgggccaaggtggtgttgacagacccagaagctgccaaatatgttcatggcatcgctgtccactggtacctggattttttggcccctgcaaaggctactctgggagagacccacagactcttccccaataccatgctgtttgcatcagaagcctgcgtggggagcaaattctgggagcagtctgttaggctgggttcctgggatcggggcatgcaatattcccatagtataataactaacctcctctaccacgtggtaggatggacagactggaatctggctttgaacccagaaggaggccccaattgggtgcgcaactttgttgacagccccatcattgtggatatcacaaaggacaccttctacaaacagcctatgttctatcatctggggcactttagcaagttcattccagagggttcccagagagtaggcttggttgcctcacagaagaatgatctggatgctgtggcactcctgcatcctgacgggagtgcagtggtggtagtactgaacaggtctagcaaagatgttcccttgactatcaaagacccagctgtgggctttctggaaaccatttcccctggatactctatccacacctatctctggagaagacagtaatga

SEQ ID NO: 244 - protein, 536 aa, synthetic construct
  REGION 1..536: note = Variant of B-Glucocerebrosidase
MEFSSPSREECPKPLSRVSIMAGSLTGLLLLQAVSWASGARPCIPKSFGYSSVVCVCNATYCDSLDPVTLPALGTFSRYESTRSGRRMELSMGPIQANHTGTGLLLTLQPEQKFQKVKGFGGAMTDAAALNILALSPPAQNLLLKSYFSEEGIGYNIIRVPMASCDFSIRTYTYADTPDDFQLHNFSLPEEDTKLKIPLIHRALQLSQRPVSLFASPWTSPTWLKTNGAVNGKGSLKGQPGDIYHQTWARYFVKFLDAYAEHKLQFWAVTAENEPSAGLLSGYPFQCLGFTPEHQRDFIARDLGPTLANSTHHNVRLLMLDDQRLLLPHWAKVVLTDPEAAKYVHGIAVHWYLDFLAPAKATLGETHRLFPNTMLFASEACVGSKFWEQSVRLGSWDRGMQYSHSIITNLLYHVVGWTDWNLALNPEGGPNWVRNFVDSPIIVDITKDTFYKQPMFYHLGHFSKFIPEGSQRVGLVASQKNDLDAVALLHPDGSAVVVVLNRSSKDVPLTIKDPAVGFLETISPGYSIHTYLWRRQ

SEQ ID NO: 245 - DNA, 1614 bp, synthetic construct
  misc_feature 1..1614: note = Variant of B-Glucocerebrosidase
  source 1..1614: mol_type = other DNA
atggagttttcttctcctagtagagaagaatgccccaagccactgagcagggtgagcatcatggctggatccctcacagggctgcttcttttgcaggcagtctcatgggcctctggagccaggccctgtattcccaagtcattcggctactcctcagtggtgtgtgtatgcaatgccacctattgtgacagtttcgatcctctcactctccctgctctgggtaccttctcccggtatgagagcacaagaagtggaagacgcatggagctctcaatgggccctatacaggctaaccacactgggacaggtctgctgctgaccctccaacctgaacagaagtttcagaaagtcaagggatttggaggagccatgactgatgcagcagcactcaacatcttggccctgtctccaccagcccaggacctgctgttgaagtcctacttctcagaggaggggattgggtacaacatcatccgggttcccatggctagctgtgacttctccattaggacctatacatacgctgacacccccgatgattttcagctccataatttcagtctccctgaagaagacaccaaactgaagatacctctgattcacagagccttgcaactgtcccaaaggccagtgagcctcttcgcttctccctggactagtcctacatggctgaagactaatggtgctctgaatgggaaaggctccctgaaaggacagccaggtgacatatatcatcagacatgggcccgctactttgtgaaattccttgatgcctatgcagagcacaagctccaattctgggcagtcaccgcagaaaacgagccctcagctgggctgctgtctggctacccctttcagtgcttgggctttactcctgagcatcaacgggacttcattgcccgggatttggggccaacactggccaacagcacccaccacaatgtaagactcctcattctggatgaccagaggctgctgctccctcattgggccaaggtggtgttgacagacccagaagctgccaaatatgttcatggcatcgctgtccactggtacctggattttttggcccctgcaaaggctactctgggagagacccacagactcttccccaataccatgctgtttgcatcagaagcctgcgtggggagcaaattctgggagcagtctgttaggctgggttcctgggatcggggcatgcaatattcccatagtataataactaacctcctctaccacgtggtaggatggacagactggaatctggctttgaacccagaaggaggccccaattgggtgcgcaactttgttgacagccccatcattgtggatatcacaaaggacaccttctacaaacagcctatgttctatcatctggggcactttagcaagttcattccagagggttcccagagagtaggcttggttgcctcacagaagaatgatctggatgctgtggcactcctgcatcctgacgggagtgcagtggtggtagtactgaacaggtctagcaaagatgttcccttgactatcaaagacccagctgtgggctttctggaaaccatttcccctggatactctatccacacctatctctggagaagacagtaatga

SEQ ID NO: 246 - protein, 536 aa, synthetic construct
  REGION 1..536: note = Variant of B-Glucocerebrosidase
MEFSSPSREECPKPLSRVSIMAGSLTGLLLLQAVSWASGARPCIPKSFGYSSVVCVCNATYCDSFDPLTLPALGTFSRYESTRSGRRMELSMGPIQANHTGTGLLLTLQPEQKFQKVKGFGGAMTDAAALNILALSPPAQDLLLKSYFSEEGIGYNIIRVPMASCDFSIRTYTYADTPDDFQLHNFSLPEEDTKLKIPLIHRALQLSQRPVSLFASPWTSPTWLKTNGALNGKGSLKGQPGDIYHQTWARYFVKFLDAYAEHKLQFWAVTAENEPSAGLLSGYPFQCLGFTPEHQRDFIARDLGPTLANSTHHNVRLLILDDQRLLLPHWAKVVLTDPEAAKYVHGIAVHWYLDFLAPAKATLGETHRLFPNTMLFASEACVGSKFWEQSVRLGSWDRGMQYSHSIITNLLYHVVGWTDWNLALNPEGGPNWVRNFVDSPIIVDITKDTFYKQPMFYHLGHFSKFIPEGSQRVGLVASQKNDLDAVALLHPDGSAVVVVLNRSSKDVPLTIKDPAVGFLETISPGYSIHTYLWRRQ

SEQ ID NO: 247 - DNA, 1614 bp, synthetic construct
  misc_feature 1..1614: note = Variant of B-Glucocerebrosidase
  source 1..1614: mol_type = other DNA
atggagttttcttctcctagtagagaagaatgccccaagccactgagcagggtgagcatcatggctggatccctcacagggctgcttcttttgcaggcagtctcatgggcctctggagccaggccctgtattcccaagtcattcggctactcctcagtggtgtgtgtatgcaatgccacctattgtgacagtctcgatcctgtcactctccctgctctgggtaccttctcccggtatgagagcacaagaagtggaagacgcatggagctctcaatgggccctatacaggctaaccgcactgggacaggtctgctgctgaccctccaacctgaacagaagtttcagaaagtcaagggatttggaggagccatgactgatgcagcagcactcaacatcttggccctgtctccaccagcccagaatctgctgttgaagtcctacttctcagaggaggggattgggtacaacatcatccgggttcccatggctagctgtgacttctccattaggacctatacatacgctgacacccccgatgattttcagctccataatttcagtctccctgaagaagacaccaaactgaagatacctctgattcacagagccttgcaactgtcccaaaggccagtgagcctcttcgcttctccctggactagtcctacatggctgaagactaatggtgctctgaatgggaaaggctccctgaaaggacagccaggtgacatatatcatcagacatgggcccgctactttgtgaaattccttgatgcctatgcagagcacaagctccaattctgggcagtcaccgcagaaaacgagccctcagctgggctgctgtctggctacccctttcagtgcttgggctttactcctgagcatcaacgggacttcattgcccgggatttggggccaacactggccaacagcacccaccacaatgtaagactcctcattctggatgaccagaggctgctgctccctcattgggccaaggtggtgttgacagacccagaagctgccaaatatgttcatggcatcgctgtccactggtacctggattttttggcccctgcaaaggctactctgggagagacccacagactcttccccaataccatgctgtttgcatcagaagcctgcgtggggagcaaattctgggagcagtctgttaggctgggttcctgggatcggggcatgcaatattcccatagtataataactaacctcctctaccacgtggtaggatggacagactggaatctggctttgaacccagaaggaggccccaattgggtgcgcaactttgttgacagccccatcattgtggatatcacaaaggacaccttctacaaacagcctatgttctatcatctggggcactttagcaagttcattccagagggttcccagagagtaggcttggttgcctcacagaagaatgatctggatgctgtggcactcctgcatcctgacgggagtgcagtggtggtagtactgaacaggtctagcaaagatgttcccttgactatcaaagacccagctgtgggctttctggaaaccatttcccctggatactctatccacacctatctctggagaagacagtaatga

SEQ ID NO: 248 - protein, 536 aa, synthetic construct
  REGION 1..536: note = Variant of B-Glucocerebrosidase
MEFSSPSREECPKPLSRVSIMAGSLTGLLLLQAVSWASGARPCIPKSFGYSSVVCVCNATYCDSLDPVTLPALGTFSRYESTRSGRRMELSMGPIQANRTGTGLLLTLQPEQKFQKVKGFGGAMTDAAALNILALSPPAQNLLLKSYFSEEGIGYNIIRVPMASCDFSIRTYTYADTPDDFQLHNFSLPEEDTKLKIPLIHRALQLSQRPVSLFASPWTSPTWLKTNGALNGKGSLKGQPGDIYHQTWARYFVKFLDAYAEHKLQFWAVTAENEPSAGLLSGYPFQCLGFTPEHQRDFIARDLGPTLANSTHHNVRLLILDDQRLLLPHWAKVVLTDPEAAKYVHGIAVHWYLDFLAPAKATLGETHRLFPNTMLFASEACVGSKFWEQSVRLGSWDRGMQYSHSIITNLLYHVVGWTDWNLALNPEGGPNWVRNFVDSPIIVDITKDTFYKQPMFYHLGHFSKFIPEGSQRVGLVASQKNDLDAVALLHPDGSAVVVVLNRSSKDVPLTIKDPAVGFLETISPGYSIHTYLWRRQ

SEQ ID NO: 249 - DNA, 1614 bp, synthetic construct
  misc_feature 1..1614: note = Variant of B-Glucocerebrosidase
  source 1..1614: mol_type = other DNA
atggagttttcttctcctagtagagaagaatgccccaagccactgagcagggtgagcatcatggctggatccctcacagggctgcttcttttgcaggcagtctcatgggcctctggagccaggccctgtattcccaagtcattcggctactcctcagtggtgtgtgtatgcaatgccacctattgtgacagtttcgatcctctcactctccctgctctgggtaccttctcccggtatgagagcacaagaagtggaagacgcatggagctctcaatgggccctatacaggctaaccgcactgggacaggtctgctgctgaccctccaacctgaacagaagtttcagaaagtcaagggatttggaggagccatgactgatgcagcagcactcaacatcttggccctgtctccaccagcccaggacctgctgttgaagtcctacttctcagaggaggggattggctacaacatcatccgggttcccatggctagctgtgacttctccattaggacctatacatacgctgacacccccgatgattttcagctccataatttcagtctccctgaagaagacaccaaactgaagatacctctgattcacagagccttgcaactgtcccaaaggccagtgagcctcttcgcttctccctggactagtcctacatggctgaagactaatggtgctgtgaatgggaaaggctccctgaaaggacagccaggtgacatatatcatcagacatgggcccgctactttgtgaaattccttgatgcctatgcagagcacaagctccaattctgggcagtcaccgcagaaaacgagccctcagctgggctgctgtctggctacccctttcagtgcttgggctttactcctgagcatcaacgggacttcattgcccgggatttggggccaacactggccaacagcacccaccacaatgtaagactcctcattctggatgaccagaggctgctgctccctcattgggccaaggtggtgttgacagacccagaagctgccaaatatgttcatggcatcgctgtccactggtacctggattttttggcccctgcaaaggctactctgggagagacccacagactcttccccaataccatgctgtttgcatcagaagcctgcgtggggagcaaattctgggagcagtctgttaggctgggttcctgggatcggggcatgcaatattcccatagtataataactaacctcctctaccacgtggtaggatggacagactggaatctggctttgaacccagaaggaggccccaattgggtgcgcaactttgttgacagccccatcattgtggatatcacaaaggacaccttctacaaacagcctatgttctatcatctggggcactttagcaagttcattccagagggttcccagagagtaggcttggttgcctcacagaagaatgatctggatgctgtggcactcctgcatcctgacgggagtgcagtggtggtagtactgaacaggtctagcaaagatgttcccttgactatcaaagacccagctgtgggctttctggaaaccatttcccctggatactctatccacacctatctctggagaagacagtaatga

SEQ ID NO: 250 - protein, 536 aa, synthetic construct
  REGION 1..536: note = Variant of B-Glucocerebrosidase
MEFSSPSREECPKPLSRVSIMAGSLTGLLLLQAVSWASGARPCIPKSFGYSSVVCVCNATYCDSFDPLTLPALGTFSRYESTRSGRRMELSMGPIQANRTGTGLLLTLQPEQKFQKVKGFGGAMTDAAALNILALSPPAQDLLLKSYFSEEGIGYNIIRVPMASCDFSIRTYTYADTPDDFQLHNFSLPEEDTKLKIPLIHRALQLSQRPVSLFASPWTSPTWLKTNGAVNGKGSLKGQPGDIYHQTWARYFVKFLDAYAEHKLQFWAVTAENEPSAGLLSGYPFQCLGFTPEHQRDFIARDLGPTLANSTHHNVRLLILDDQRLLLPHWAKVVLTDPEAAKYVHGIAVHWYLDFLAPAKATLGETHRLFPNTMLFASEACVGSKFWEQSVRLGSWDRGMQYSHSIITNLLYHVVGWTDWNLALNPEGGPNWVRNFVDSPIIVDITKDTFYKQPMFYHLGHFSKFIPEGSQRVGLVASQKNDLDAVALLHPDGSAVVVVLNRSSKDVPLTIKDPAVGFLETISPGYSIHTYLWRRQ

SEQ ID NO: 251 - DNA, 1614 bp, synthetic construct
  misc_feature 1..1614: note = Variant of B-Glucocerebrosidase
  source 1..1614: mol_type = other DNA
atggagttttcttctcctagtagagaagaatgccccaagccactgagcagggtgagcatcatggctggatccctcacagggctgcttcttttgcaggcagtctcatgggcctctggagccaggccctgtattcccaagtcattcggctactcctcagtggtgtgtgtatgcaatgccacctattgtgacagtttcgatcctgtcactctccctgctctgggtaccttctcccggtatgagagcacaagaagtggaagacgcatggagctctcaatgggccctatacaggctaaccacactgggacaggtctgctgctgaccctccaacctgaacagaagtttcagaaagtcaagggatttggaggagccatgactgatgcagcagcactcaacatcttggccctgtctccaccagcccagaatctgctgttgaagtcctacttctcagaggaggggattgagtacaacatcatccgggttcccatggctagctgtgacttctccattaggacctatacatacgctgacacccccgatgattttcagctccataatttcagtctccctgaagaagacaccaaactgaagatacctctgattcacagagccttgcaactgtcccaaaggccagtgagcctcttcgcttctccctggactagtcctacatggctgaagactaatggtgctgttaatgggaaaggctccctgaaaggacagccaggtgacatatatcatcagacatgggcccgctactttgtgaaattccttgatgcctatgcagagcacaagctccaattctgggcagtcaccgcagaaaacgagccctcagctgggctgctgtctggctacccctttcagtgcttgggctttactcctgagcatcaacgggacttcattgcccgggatttggggccaacactggccaacagcacccaccacaatgtaagactcctcattctggatgaccagaggctgctgctccctcattgggccaaggtggtgttgacagacccagaagctgccaaatatgttcatggcatcgctgtccactggtacctggattttttggcccctgcaaaggctactctgggagagacccacagactcttccccaataccatgctgtttgcatcagaagcctgcgtggggagcaaattctgggagcagtctgttaggctgggttcctgggatcggggcatgcaatattcccatagtataataactaacctcctctaccacgtggtaggatggacagactggaatctggctttgaacccagaaggaggccccaattgggtgcgcaactttgttgacagccccatcattgtggatatcacaaaggacaccttctacaaacagcctatgttctatcatctggggcactttagcaagttcattccagagggttcccagagagtaggcttggttgcctcacagaagaatgatctggatgctgtggcactcctgcatcctgacgggagtgcagtggtggtagtactgaacaggtctagcaaagatgttcccttgactatcaaagacccagctgtgggctttctggaaaccatttcccctggatactctatccacacctatctctggagaagacagtaatga

SEQ ID NO: 252 - protein, 536 aa, synthetic construct
  REGION 1..536: note = Variant of B-Glucocerebrosidase
MEFSSPSREECPKPLSRVSIMAGSLTGLLLLQAVSWASGARPCIPKSFGYSSVVCVCNATYCDSFDPVTLPALGTFSRYESTRSGRRMELSMGPIQANHTGTGLLLTLQPEQKFQKVKGFGGAMTDAAALNILALSPPAQNLLLKSYFSEEGIEYNIIRVPMASCDFSIRTYTYADTPDDFQLHNFSLPEEDTKLKIPLIHRALQLSQRPVSLFASPWTSPTWLKTNGAVNGKGSLKGQPGDIYHQTWARYFVKFLDAYAEHKLQFWAVTAENEPSAGLLSGYPFQCLGFTPEHQRDFIARDLGPTLANSTHHNVRLLILDDQRLLLPHWAKVVLTDPEAAKYVHGIAVHWYLDFLAPAKATLGETHRLFPNTMLFASEACVGSKFWEQSVRLGSWDRGMQYSHSIITNLLYHVVGWTDWNLALNPEGGPNWVRNFVDSPIIVDITKDTFYKQPMFYHLGHFSKFIPEGSQRVGLVASQKNDLDAVALLHPDGSAVVVVLNRSSKDVPLTIKDPAVGFLETISPGYSIHTYLWRRQ

SEQ ID NO: 253 - DNA, 1614 bp, synthetic construct
  misc_feature 1..1614: note = Variant of B-Glucocerebrosidase
  source 1..1614: mol_type = other DNA
atggagttttcttctcctagtagagaagaatgccccaagccactgagcagggtgagcatcatggctggatccctcacagggctgcttcttttgcaggcagtctcatgggcctctggagccaggccctgtattcccaagtcattcggctactcctcagtggtgtgtgtatgcaatgccacctattgtgacagtttcgatcctccaactctccctgctctgggtaccttctcccggtatgagagcacaagaagtggaagacgcatggagctctcaatgggccctatacaggctaaccacactgggacaggtctgctgctgaccctccaacctgaacagaagtttcagaaagtcaagggatttggaggagccatgactgatgcagcagcactcaacatcttggccctgtctccaccagcccaggacctgctgttgaagtcctacttctcagaggaggggattgagtacaacatcatccgggttcccatggctagctgtgacttctccattaggacctatacatacgctgacacccccgatgattttcagctccataatttcagtctccctgaagaagacaccaaactgaagatacctctgattcacagagccttgcaactgtcccaaaggccagtgagcctcttcgcttctccctggactagtcctacatggctgaagactaatggtgctgttaatgggaaaggctccctgaaaggacagccaggtgacatatatcatcagacatgggcccgctactttgtgaaattccttgatgcctatgcagagcacaagctccaattctgggcagtcaccgcagaaaacgagccctcagctgggctgctgtctggctacccctttcagtgcttgggctttactcctgagcatcaacgggacttcattgcccgggatttggggccaacactggccaacagcacccaccacaatgtaagactcctcatgctggatgaccagaggctgctgctccctcattgggccaaggtggtgttgacagacccagaagctgccaaatatgttcatggcatcgctgtccactggtacctggattttttggcccctgcaaaggctactctgggagagacccacagactcttccccaataccatgctgtttgcatcagaagcctgcgtggggagcaaattctgggagcagtctgttaggctgggttcctgggatcggggcatgcaatattcccatagtataataactaacctcctctaccacgtggtaggatggacagactggaatctggctttgaacccagaaggaggccccaattgggtgcgcaactttgttgacagccccatcattgtggatatcacaaaggacaccttctacaaacagcctatgttctatcatctggggcactttagcaagttcattccagagggttcccagagagtaggcttggttgcctcacagaagaatgatctggatgctgtggcactcctgcatcctgacgggagtgcagtggtggtagtactgaacaggtctagcaaagatgttcccttgactatcaaagacccagctgtgggctttctggaaaccatttcccctggatactctatccacacctatctctggagaagacagtaatga

SEQ ID NO: 254 - protein, 536 aa, synthetic construct
  REGION 1..536: note = Variant of B-Glucocerebrosidase
MEFSSPSREECPKPLSRVSIMAGSLTGLLLLQAVSWASGARPCIPKSFGYSSVVCVCNATYCDSFDPPTLPALGTFSRYESTRSGRRMELSMGPIQANHTGTGLLLTLQPEQKFQKVKGFGGAMTDAAALNILALSPPAQDLLLKSYFSEEGIEYNIIRVPMASCDFSIRTYTYADTPDDFQLHNFSLPEEDTKLKIPLIHRALQLSQRPVSLFASPWTSPTWLKTNGAVNGKGSLKGQPGDIYHQTWARYFVKFLDAYAEHKLQFWAVTAENEPSAGLLSGYPFQCLGFTPEHQRDFIARDLGPTLANSTHHNVRLLMLDDQRLLLPHWAKVVLTDPEAAKYVHGIAVHWYLDFLAPAKATLGETHRLFPNTMLFASEACVGSKFWEQSVRLGSWDRGMQYSHSIITNLLYHVVGWTDWNLALNPEGGPNWVRNFVDSPIIVDITKDTFYKQPMFYHLGHFSKFIPEGSQRVGLVASQKNDLDAVALLHPDGSAVVVVLNRSSKDVPLTIKDPAVGFLETISPGYSIHTYLWRRQ

SEQ ID NO: 255 - DNA, 1614 bp, synthetic construct
  misc_feature 1..1614: note = Variant of B-Glucocerebrosidase
  source 1..1614: mol_type = other DNA
atggagttttcttctcctagtagagaagaatgccccaagccactgagcagggtgagcatcatggctggatccctcacagggctgcttcttttgcaggcagtctcatgggcctctggagccaggccctgtattcccaagtcattcggctactcctcagtggtgtgtgtatgcaatgccacctattgtgacagtttcgatcctgtcactctccctgctctgggtaccttctcccggtatgagagcacaagaagtggaagacgcatggagctctcaatgggccctatacaggctaaccgcactgggacaggtctgctgctgaccctccaacctgaacagaagtttcagaaagtcaagggatttggaggagccatgactgatgcagcagcactcaacatcttggccctgtctccaccagcccagaatctgctgttgaagtcctacttctcagaggaggggattgggtacaacatcatccgggttcccatggctagctgtgacttctccattaggacctatacatacgctgacacccccgatgattttcagctccataatttcagtctccctgaagaagacaccaaactgaagatacctctgattcacagagccttgcaactgtcccaaaggccagtgagcctcttcgcttctccctggactagtcctacatggctgaagactaatggtgctgttaatgggaaaggctccctgaaaggacagccaggtgacatatatcatcagacatgggcccgctactttgtgaaattccttgatgcctatgcagagcacaagctccaattctgggcagtcaccgcagaaaacgagccctcagctgggctgctgtctggctacccctttcagtgcttgggctttactcctgagcatcaacgggacttcattgcccgggatttggggccaacactggccaacagcacccaccacaatgtaagactcctcatgctggatgaccagaggctgctgctccctcattgggccaaggtggtgttgacagacccagaagctgccaaatatgttcatggcatcgctgtccactggtacctggattttttggcccctgcaaaggctactctgggagagacccacagactcttccccaataccatgctgtttgcatcagaagcctgcgtggggagcaaattctgggagcagtctgttaggctgggttcctgggatcggggcatgcaatattcccatagtataataactaacctcctctaccacgtggtaggatggacagactggaatctggctttgaacccagaaggaggccccaattgggtgcgcaactttgttgacagccccatcattgtggatatcacaaaggacaccttctacaaacagcctatgttctatcatctggggcactttagcaagttcattccagagggttcccagagagtaggcttggttgcctcacagaagaatgatctggatgctgtggcactcctgcatcctgacgggagtgcagtggtggtagtactgaacaggtctagcaaagatgttcccttgactatcaaagacccagctgtgggctttctggaaaccatttcccctggatactctatccacacctatctctggagaagacagtaatga

SEQ ID NO: 256 - protein, 536 aa, synthetic construct
  REGION 1..536: note = Variant of B-Glucocerebrosidase
MEFSSPSREECPKPLSRVSIMAGSLTGLLLLQAVSWASGARPCIPKSFGYSSVVCVCNATYCDSFDPVTLPALGTFSRYESTRSGRRMELSMGPIQANRTGTGLLLTLQPEQKFQKVKGFGGAMTDAAALNILALSPPAQNLLLKSYFSEEGIGYNIIRVPMASCDFSIRTYTYADTPDDFQLHNFSLPEEDTKLKIPLIHRALQLSQRPVSLFASPWTSPTWLKTNGAVNGKGSLKGQPGDIYHQTWARYFVKFLDAYAEHKLQFWAVTAENEPSAGLLSGYPFQCLGFTPEHQRDFIARDLGPTLANSTHHNVRLLMLDDQRLLLPHWAKVVLTDPEAAKYVHGIAVHWYLDFLAPAKATLGETHRLFPNTMLFASEACVGSKFWEQSVRLGSWDRGMQYSHSIITNLLYHVVGWTDWNLALNPEGGPNWVRNFVDSPIIVDITKDTFYKQPMFYHLGHFSKFIPEGSQRVGLVASQKNDLDAVALLHPDGSAVVVVLNRSSKDVPLTIKDPAVGFLETISPGYSIHTYLWRRQ

SEQ ID NO: 257 - DNA, 1614 bp, synthetic construct
  misc_feature 1..1614: note = Variant of B-Glucocerebrosidase
  source 1..1614: mol_type = other DNA
atggagttttcttctcctagtagagaagaatgccccaagccactgagcagggtgagcatcatggctggatccctcacagggctgcttcttttgcaggcagtctcatgggcctctggagccaggccctgtattcccaagtcattcggctactcctcagtggtgtgtgtatgcaatgccacctattgtgacagtttcgatcctccaactctccctgctctgggtaccttctcccggtatgagagcacaagaagtggaagacgcatggagctctcaatgggccctatacaggctaaccgcactgggacaggtctgctgctgaccctccaacctgaacagaagtttcagaaagtcaagggatttggaggagccatgactgatgcagcagcactcaacatcttggccctgtctccaccagcccagaatctgctgttgaagtcctacttctcagaggaggggattgggtacaacatcatccgggttcccatggctagctgtgacttctccattaggacctatacatacgctgacacccccgatgattttcagctccataatttcagtctccctgaagaagacaccaaactgaagatacctctgattcacagagccttgcaactgtcccaaaggccagtgagcctcttcgcttctccctggactagtcctacatggctgaagactaatggtgctctgaatgggaaaggctccctgaaaggacagccaggtgacatatatcatcagacatgggcccgctactttgtgaaattccttgatgcctatgcagagcacaagctccaattctgggcagtcaccgcagaaaacgagccctcagctgggctgctgtctggctacccctttcagtgcttgggctttactcctgagcatcaacgggacttcattgcccgggatttggggccaacactggccaacagcacccaccacaatgtaagactcctcattctggatgaccagaggctgctgctccctcattgggccaaggtggtgttgacagacccagaagctgccaaatatgttcatggcatcgctgtccactggtacctggattttttggcccctgcaaaggctactctgggagagacccacagactcttccccaataccatgctgtttgcatcagaagcctgcgtggggagcaaattctgggagcagtctgttaggctgggttcctgggatcggggcatgcaatattcccatagtataataactaacctcctctaccacgtggtaggatggacagactggaatctggctttgaacccagaaggaggccccaattgggtgcgcaactttgttgacagccccatcattgtggatatcacaaaggacaccttctacaaacagcctatgttctatcatctggggcactttagcaagttcattccagagggttcccagagagtaggcttggttgcctcacagaagaatgatctggatgctgtggcactcctgcatcctgacgggagtgcagtggtggtagtactgaacaggtctagcaaagatgttcccttgactatcaaagacccagctgtgggctttctggaaaccatttcccctggatactctatccacacctatctctggagaagacagtaatga

SEQ ID NO: 258 - protein, 536 aa, synthetic construct
  REGION 1..536: note = Variant of B-Glucocerebrosidase
MEFSSPSREECPKPLSRVSIMAGSLTGLLLLQAVSWASGARPCIPKSFGYSSVVCVCNATYCDSFDPPTLPALGTFSRYESTRSGRRMELSMGPIQANRTGTGLLLTLQPEQKFQKVKGFGGAMTDAAALNILALSPPAQNLLLKSYFSEEGIGYNIIRVPMASCDFSIRTYTYADTPDDFQLHNFSLPEEDTKLKIPLIHRALQLSQRPVSLFASPWTSPTWLKTNGALNGKGSLKGQPGDIYHQTWARYFVKFLDAYAEHKLQFWAVTAENEPSAGLLSGYPFQCLGFTPEHQRDFIARDLGPTLANSTHHNVRLLILDDQRLLLPHWAKVVLTDPEAAKYVHGIAVHWYLDFLAPAKATLGETHRLFPNTMLFASEACVGSKFWEQSVRLGSWDRGMQYSHSIITNLLYHVVGWTDWNLALNPEGGPNWVRNFVDSPIIVDITKDTFYKQPMFYHLGHFSKFIPEGSQRVGLVASQKNDLDAVALLHPDGSAVVVVLNRSSKDVPLTIKDPAVGFLETISPGYSIHTYLWRRQ

SEQ ID NO: 259 - DNA, 1614 bp, synthetic construct
  misc_feature 1..1614: note = Variant of B-Glucocerebrosidase
  source 1..1614: mol_type = other DNA
atggagttttcttctcctagtagagaagaatgccccaagccactgagcagggtgagcatcatggctggatccctcacagggctgcttcttttgcaggcagtctcatgggcctctggagccaggccctgtattcccaagtcattcggctactcctcagtggtgtgtgtatgcaatgccacctattgtgacagtttcgatcctccaactctccctgctctgggtaccttctcccggtatgagagcacaagaagtggaagacgcatggagctctcaatgggccctatacaggctaaccgcactgggacaggtctgctgctgaccctccaacctgaacagaagtttcagaaagtcaagggatttggaggagccatgactgatgcagcagcactcaacatcttggccctgtctccaccagcccagaacctgctgttgaagtcctacttctcagaggaggggattgggtacaacatcatccgggttcccatggctagctgtgacttctccattaggacctatacatacgctgacacccccgatgattttcagctccataatttcagtctccctgaagaagacaccaaactgaagatacctctgattcacagagccttgcaactgtcccaaaggccagtgagcctcttcgcttctccctggactagtcctacatggctgaagactaatggtgctgttaatgggaaaggctccctgaaaggacagccaggtgacatatatcatcagacatgggcccgctactttgtgaaattccttgatgcctatgcagagcacaagctccaattctgggcagtcaccgcagaaaacgagccctcagctgggctgctgtctggctacccctttcagtgcttgggctttactcctgagcatcaacgggacttcattgcccgggatttggggccaacactggccaacagcacccaccacaatgtaagactcctcatgctggatgaccagaggctgctgctccctcattgggccaaggtggtgttgacagacccagaagctgccaaatatgttcatggcatcgctgtccactggtacctggattttttggcccctgcaaaggctactctgggagagacccacagactcttccccaataccatgctgtttgcatcagaagcctgcgtggggagcaaattctgggagcagtctgttaggctgggttcctgggatcggggcatgcaatattcccatagtataataactaacctcctctaccacgtggtaggatggacagactggaatctggctttgaacccagaaggaggccccaattgggtgcgcaactttgttgacagccccatcattgtggatatcacaaaggacaccttctacaaacagcctatgttctatcatctggggcactttagcaagttcattccagagggttcccagagagtaggcttggttgcctcacagaagaatgatctggatgctgtggcactcctgcatcctgacgggagtgcagtggtggtagtactgaacaggtctagcaaagatgttcccttgactatcaaagacccagctgtgggctttctggaaaccatttcccctggatactctatccacacctatctctggagaagacagtaatga

SEQ ID NO: 260 - protein, 536 aa, synthetic construct
  REGION 1..536: note = Variant of B-Glucocerebrosidase
MEFSSPSREECPKPLSRVSIMAGSLTGLLLLQAVSWASGARPCIPKSFGYSSVVCVCNATYCDSFDPPTLPALGTFSRYESTRSGRRMELSMGPIQANRTGTGLLLTLQPEQKFQKVKGFGGAMTDAAALNILALSPPAQNLLLKSYFSEEGIGYNIIRVPMASCDFSIRTYTYADTPDDFQLHNFSLPEEDTKLKIPLIHRALQLSQRPVSLFASPWTSPTWLKTNGAVNGKGSLKGQPGDIYHQTWARYFVKFLDAYAEHKLQFWAVTAENEPSAGLLSGYPFQCLGFTPEHQRDFIARDLGPTLANSTHHNVRLLMLDDQRLLLPHWAKVVLTDPEAAKYVHGIAVHWYLDFLAPAKATLGETHRLFPNTMLFASEACVGSKFWEQSVRLGSWDRGMQYSHSIITNLLYHVVGWTDWNLALNPEGGPNWVRNFVDSPIIVDITKDTFYKQPMFYHLGHFSKFIPEGSQRVGLVASQKNDLDAVALLHPDGSAVVVVLNRSSKDVPLTIKDPAVGFLETISPGYSIHTYLWRRQ

SEQ ID NO: 261 - DNA, 1614 bp, synthetic construct
  misc_feature 1..1614: note = Variant of B-Glucocerebrosidase
  source 1..1614: mol_type = other DNA
atggagttttcttctcctagtagagaagaatgccccaagccactgagcagggtgagcatcatggctggatccctcacagggctgcttcttttgcaggcagtctcatgggcctctggagccaggccctgtattcccaagtcattcggctactcctcagtggtgtgtgtatgcaatgccacctattgtgacagtttcgatcctcccactctccctgctctgggtaccttctcccggtatgagagcacaagaagtggaagacgcatggagctctcaatgggccctatacaggctaaccacactgggacaggtctgctgctgaccctccaacctgaacagaagtttcagaaagtcaagggatttggaggagccatgactgatgcagcagcactcaacatcttggccctgtctccaccagcccagaacctgctgttgaagtcctacttctcagaggaggggattggctacaacatcatccgggttcccatggctagctgtgacttctccattaggacctatacatacgctgacacccccgatgattttcagctccataatttcagtctccctgaagaagacaccaaactgaagatacctctgattcacagagccttgcaactgtcccaaaggccagtgagcctcttcgcttctccctggactagtcctacatggctgaagactaatggtgctctgaatgggaaaggctccctgaaaggacagccaggtgacatatatcatcagacatgggcccgctactttgtgaaattccttgatgcctatgcagagcacaagctccaattctgggcagtcaccgcagaaaacgagccctcagctgggctgctgtctggctacccctttcagtgcttgggctttactcctgagcatcaacgggacttcattgcccgggatttggggccaacactggccaacagcacccaccacaatgtaagactcctcatgctggatgaccagaggctgctgctccctcattgggccaaggtggtgttgacagacccagaagctgccaaatatgttcatggcatcgctgtccactggtacctggattttttggcccctgcaaaggctactctgggagagacccacagactcttccccaataccatgctgtttgcatcagaagcctgcgtggggagcaaattctgggagcagtctgttaggctgggttcctgggatcggggcatgcaatattcccatagtataataactaacctcctctaccacgtggtaggatggacagactggaatctggctttgaacccagaaggaggccccaattgggtgcgcaactttgttgacagccccatcattgtggatatcacaaaggacaccttctacaaacagcctatgttctatcatctggggcactttagcaagttcattccagagggttcccagagagtaggcttggttgcctcacagaagaatgatctggatgctgtggcactcctgcatcctgacgggagtgcagtggtggtagtactgaacaggtctagcaaagatgttcccttgactatcaaagacccagctgtgggctttctggaaaccatttcccctggatactctatccacacctatctctggagaagacagtaatga

SEQ ID NO: 262 - protein, 536 aa, synthetic construct
  REGION 1..536: note = Variant of B-Glucocerebrosidase
MEFSSPSREECPKPLSRVSIMAGSLTGLLLLQAVSWASGARPCIPKSFGYSSVVCVCNATYCDSFDPPTLPALGTFSRYESTRSGRRMELSMGPIQANHTGTGLLLTLQPEQKFQKVKGFGGAMTDAAALNILALSPPAQNLLLKSYFSEEGIGYNIIRVPMASCDFSIRTYTYADTPDDFQLHNFSLPEEDTKLKIPLIHRALQLSQRPVSLFASPWTSPTWLKTNGALNGKGSLKGQPGDIYHQTWARYFVKFLDAYAEHKLQFWAVTAENEPSAGLLSGYPFQCLGFTPEHQRDFIARDLGPTLANSTHHNVRLLMLDDQRLLLPHWAKVVLTDPEAAKYVHGIAVHWYLDFLAPAKATLGETHRLFPNTMLFASEACVGSKFWEQSVRLGSWDRGMQYSHSIITNLLYHVVGWTDWNLALNPEGGPNWVRNFVDSPIIVDITKDTFYKQPMFYHLGHFSKFIPEGSQRVGLVASQKNDLDAVALLHPDGSAVVVVLNRSSKDVPLTIKDPAVGFLETISPGYSIHTYLWRRQ

SEQ ID NO: 263 - DNA, 1614 bp, synthetic construct
  misc_feature 1..1614: note = Variant of B-Glucocerebrosidase
  source 1..1614: mol_type = other DNA
atggagttttcttctcctagtagagaagaatgccccaagccactgagcagggtgagcatcatggctggatccctcacagggctgcttcttttgcaggcagtctcatgggcctctggagccaggccctgtattcccaagtcattcggctactcctcagtggtgtgtgtatgcaatgccacctattgtgacagtttcgatcctgtcactctccctgctctgggtaccttctcccggtatgagagcacaagaagtggaagacgcatggagctctcaatgggccctatacaggctaaccacactgggacaggtctgctgctgaccctccaacctgaacagaagtttcagaaagtcaagggatttggaggagccatgactgatgcagcagcactcaacatcttggccctgtctccaccagcccagaatctgctgttgaagtcctacttctcagaggaggggattggctacaacatcatccgggttcccatggctagctgtgacttctccattaggacctatacatacgctgacacccccgatgattttcagctccataatttcagtctccctgaagaagacaccaaactgaagatacctctgattcacagagccttgcaactgtcccaaaggccagtgagcctcttcgcttctccctggactagtcctacatggctgaagactaatggtgctctgaatgggaaaggctccctgaaaggacagccaggtgacatatatcatcagacatgggcccgctactttgtgaaattccttgatgcctatgcagagcacaagctccaattctgggcagtcaccgcagaaaacgagccctcagctgggctgctgtctggctacccctttcagtgcttgggctttactcctgagcatcaacgggacttcattgcccgggatttggggccaacactggccaacagcacccaccacaatgtaagactcctcattctggatgaccagaggctgctgctccctcattgggccaaggtggtgttgacagacccagaagctgccaaatatgttcatggcatcgctgtccactggtacctggattttttggcccctgcaaaggctactctgggagagacccacagactcttccccaataccatgctgtttgcatcagaagcctgcgtggggagcaaattctgggagcagtctgttaggctgggttcctgggatcggggcatgcaatattcccatagtataataactaacctcctctaccacgtggtaggatggacagactggaatctggctttgaacccagaaggaggccccaattgggtgcgcaactttgttgacagccccatcattgtggatatcacaaaggacaccttctacaaacagcctatgttctatcatctggggcactttagcaagttcattccagagggttcccagagagtaggcttggttgcctcacagaagaatgatctggatgctgtggcactcctgcatcctgacgggagtgcagtggtggtagtactgaacaggtctagcaaagatgttcccttgactatcaaagacccagctgtgggctttctggaaaccatttcccctggatactctatccacacctatctctggagaagacagtaatga

SEQ ID NO: 264 - protein, 536 aa, synthetic construct
  REGION 1..536: note = Variant of B-Glucocerebrosidase
MEFSSPSREECPKPLSRVSIMAGSLTGLLLLQAVSWASGARPCIPKSFGYSSVVCVCNATYCDSFDPVTLPALGTFSRYESTRSGRRMELSMGPIQANHTGTGLLLTLQPEQKFQKVKGFGGAMTDAAALNILALSPPAQNLLLKSYFSEEGIGYNIIRVPMASCDFSIRTYTYADTPDDFQLHNFSLPEEDTKLKIPLIHRALQLSQRPVSLFASPWTSPTWLKTNGALNGKGSLKGQPGDIYHQTWARYFVKFLDAYAEHKLQFWAVTAENEPSAGLLSGYPFQCLGFTPEHQRDFIARDLGPTLANSTHHNVRLLILDDQRLLLPHWAKVVLTDPEAAKYVHGIAVHWYLDFLAPAKATLGETHRLFPNTMLFASEACVGSKFWEQSVRLGSWDRGMQYSHSIITNLLYHVVGWTDWNLALNPEGGPNWVRNFVDSPIIVDITKDTFYKQPMFYHLGHFSKFIPEGSQRVGLVASQKNDLDAVALLHPDGSAVVVVLNRSSKDVPLTIKDPAVGFLETISPGYSIHTYLWRRQ

SEQ ID NO: 265 - DNA, 1614 bp, synthetic construct
  misc_feature 1..1614: note = Variant of B-Glucocerebrosidase
  source 1..1614: mol_type = other DNA
atggagttttcttctcctagtagagaagaatgccccaagccactgagcagggtgagcatcatggctggatccctcacagggctgcttcttttgcaggcagtctcatgggcctctggagccaggccctgtattcccaagtcattcggctactcctcagtggtgtgtgtatgcaatgccacctattgtgacagtttcgatcctctcactctccctgctctgggtaccttctcccggtatgagagcacaagaagtggaagacgcatggagctctcaatgggccctatacaggctaaccacactgggacaggtctgctgctgaccctccaacctgaacagaagtttcagaaagtcaagggatttggaggagccatgactgatgcagcagcactcaacatcttggccctgtctccaccagcccagaacctgctgttgaagtcctacttctcagaggaggggattgggtacaacatcatccgggttcccatggctagctgtgacttctccattaggacctatacatacgctgacacccccgatgattttcagctccataatttcagtctccctgaagaagacaccaaactgaagatacctctgattcacagagccttgcaactgtcccaaaggccagtgagcctcttcgcttctccctggactagtcctacatggctgaagactaatggtgctgttaatgggaaaggctccctgaaaggacagccaggtgacatatatcatcagacatgggcccgctactttgtgaaattccttgatgcctatgcagagcacaagctccaattctgggcagtcaccgcagaaaacgagccctcagctgggctgctgtctggctacccctttcagtgcttgggctttactcctgagcatcaacgggacttcattgcccgggatttggggccaacactggccaacagcacccaccacaatgtaagactcctcatgctggatgaccagaggctgctgctccctcattgggccaaggtggtgttgacagacccagaagctgccaaatatgttcatggcatcgctgtccactggtacctggattttttggcccctgcaaaggctactctgggggagacccacagactcttccccaataccatgctgtttgcatcagaagcctgcgtggggagcaaattctgggagcagtctgttaggctgggttcctgggatcggggcatgcaatattcccatagtataataactaacctcctctaccacgtggtaggatggacagactggaatctggctttgaacccagaaggaggccccaattgggtgcgcaactttgttgacagccccatcattgtggatatcacaaaggacaccttctacaaacagcctatgttctatcatctggggcactttagcaagttcattccagagggttcccagagagtaggcttggttgcctcacagaagaatgatctggatgctgtggcactcctgcatcctgacgggagtgcagtggtggtagtactgaacaggtctagcaaagatgttcccttgactatcaaagacccagctgtgggctttctggaaaccatttcccctggatactctatccacacctatctctggagaagacagtaatga

SEQ ID NO: 266 - protein, 536 aa, synthetic construct
  REGION 1..536: note = Variant of B-Glucocerebrosidase
MEFSSPSREECPKPLSRVSIMAGSLTGLLLLQAVSWASGARPCIPKSFGYSSVVCVCNATYCDSFDPLTLPALGTFSRYESTRSGRRMELSMGPIQANHTGTGLLLTLQPEQKFQKVKGFGGAMTDAAALNILALSPPAQNLLLKSYFSEEGIGYNIIRVPMASCDFSIRTYTYADTPDDFQLHNFSLPEEDTKLKIPLIHRALQLSQRPVSLFASPWTSPTWLKTNGAVNGKGSLKGQPGDIYHQTWARYFVKFLDAYAEHKLQFWAVTAENEPSAGLLSGYPFQCLGFTPEHQRDFIARDLGPTLANSTHHNVRLLMLDDQRLLLPHWAKVVLTDPEAAKYVHGIAVHWYLDFLAPAKATLGETHRLFPNTMLFASEACVGSKFWEQSVRLGSWDRGMQYSHSIITNLLYHVVGWTDWNLALNPEGGPNWVRNFVDSPIIVDITKDTFYKQPMFYHLGHFSKFIPEGSQRVGLVASQKNDLDAVALLHPDGSAVVVVLNRSSKDVPLTIKDPAVGFLETISPGYSIHTYLWRRQ

SEQ ID NO: 267 - DNA, 1614 bp, synthetic construct
  misc_feature 1..1614: note = Variant of B-Glucocerebrosidase
  source 1..1614: mol_type = other DNA
atggagttttcttctcctagtagagaagaatgccccaagccactgagcagggtgagcatcatggctggatccctcacagggctgcttcttttgcaggcagtctcatgggcctctggagccaggccctgtattcccaagtcattcggctactcctcagtggtgtgtgtatgcaatgccacctattgtgacagtttcgatcctccaactctccctgctctgggtaccttctcccggtatgagagcacaagaagtggaagacgcatggagctctcaatgggccctatacaggctaaccacactgggacaggtctgctgctgaccctccaacctgaacagaagtttcagaaagtcaagggatttggaggagccatgactgatgcagcagcactcaacatcttggccctgtctccaccagcccagaatctgctgttgaagtcctacttctcagaggaggggattgagtacaacatcatccgggttcccatggctagctgtgacttctccattaggacctatacatacgctgacacccccgatgattttcagctccataatttcagtctccctgaagaagacaccaaactgaagatacctctgattcacagagccttgcaactgtcccaaaggccagtgagcctcttcgcttctccctggactagtcctacatggctgaagactaatggtgctgttaatgggaaaggctccctgaaaggacagccaggtgacatatatcatcagacatgggcccgctactttgtgaaattccttgatgcctatgcagagcacaagctccaattctgggcagtcaccgcagaaaacgagccctcagctgggctgctgtctggctacccctttcagtgcttgggctttactcctgagcatcaacgggacttcattgcccgggatttggggccaacactggccaacagcacccaccacaatgtaagactcctcattctggatgaccagaggctgctgctccctcattgggccaaggtggtgttgacagacccagaagctgccaaatatgttcatggcatcgctgtccactggtacctggattttttggcccctgcaaaggctactctgggagagacccacagactcttccccaataccatgctgtttgcatcagaagcctgcgtggggagcaaattctgggagcagtctgttaggctgggttcctgggatcggggcatgcaatattcccatagtataataactaacctcctctaccacgtggtaggatggacagactggaatctggctttgaacccagaaggaggccccaattgggtgcgcaactttgttgacagccccatcattgtggatatcacaaaggacaccttctacaaacagcctatgttctatcatctggggcactttagcaagttcattccagagggttcccagagagtaggcttggttgcctcacagaagaatgatctggatgctgtggcactcctgcatcctgacgggagtgcagtggtggtagtactgaacaggtctagcaaagatgttcccttgactatcaaagacccagctgtgggctttctggaaaccatttcccctggatactctatccacacctatctctggagaagacagtaatga

SEQ ID NO: 268 - protein, 536 aa, synthetic construct
  REGION 1..536: note = Variant of B-Glucocerebrosidase
MEFSSPSREECPKPLSRVSIMAGSLTGLLLLQAVSWASGARPCIPKSFGYSSVVCVCNATYCDSFDPPTLPALGTFSRYESTRSGRRMELSMGPIQANHTGTGLLLTLQPEQKFQKVKGFGGAMTDAAALNILALSPPAQNLLLKSYFSEEGIEYNIIRVPMASCDFSIRTYTYADTPDDFQLHNFSLPEEDTKLKIPLIHRALQLSQRPVSLFASPWTSPTWLKTNGAVNGKGSLKGQPGDIYHQTWARYFVKFLDAYAEHKLQFWAVTAENEPSAGLLSGYPFQCLGFTPEHQRDFIARDLGPTLANSTHHNVRLLILDDQRLLLPHWAKVVLTDPEAAKYVHGIAVHWYLDFLAPAKATLGETHRLFPNTMLFASEACVGSKFWEQSVRLGSWDRGMQYSHSIITNLLYHVVGWTDWNLALNPEGGPNWVRNFVDSPIIVDITKDTFYKQPMFYHLGHFSKFIPEGSQRVGLVASQKNDLDAVALLHPDGSAVVVVLNRSSKDVPLTIKDPAVGFLETISPGYSIHTYLWRRQ

SEQ ID NO: 269 - DNA, 1614 bp, synthetic construct
  misc_feature 1..1614: note = Variant of B-Glucocerebrosidase
  source 1..1614: mol_type = other DNA
atggagttttcttctcctagtagagaagaatgccccaagccactgagcagggtgagcatcatggctggatccctcacagggctgcttcttttgcaggcagtctcatgggcctctggagccaggccctgtattcccaagtcattcggctactcctcagtggtgtgtgtatgcaatgccacctattgtgacagtctcgatcctctcactctccctgctctgggtaccttctcccggtatgagagcacaagaagtggaagacgcatggagctctcaatgggccctatacaggctaaccacactgggacaggtctgctgctgaccctccaacctgaacagaagtttcagaaagtcaagggatttggaggagccatgactgatgcagcagcactcaacatcttggccctgtctccaccagcccagaatctgctgttgaagtcctacttctcagaggaggggattgagtacaacatcatccgggttcccatggctagctgtgacttctccattaggacctatacatacgctgacacccccgatgattttcagctccataatttcagtctccctgaagaagacaccaaactgaagatacctctgattcacagagccttgcaactgtcccaaaggccagtgagcctcttcgcttctccctggactagtcctacatggctgaagactaatggtgctgttaatgggaaaggctccctgaaaggacagccaggtgacatatatcatcagacatgggcccgctactttgtgaaattccttgatgcctatgcagagcacaagctccaattctgggcagtcaccgcagaaaacgagccctcagctgggctgctgtctggctacccctttcagtgcttgggctttactcctgagcatcaacgggacttcattgcccgggatttggggccaacactggccaacagcacccaccacaatgtaagactcctcattctggatgaccagaggctgctgctccctcattgggccaaggtggtgttgacagacccagaagctgccaaatatgttcatggcatcgctgtccactggtacctggattttttggcccctgcaaaggctactctgggagagacccacagactcttccccaataccatgctgtttgcatcagaagcctgcgtggggagcaaattctgggagcagtctgttaggctgggttcctgggatcggggcatgcaatattcccatagtataataactaacctcctctaccacgtggtaggatggacagactggaatctggctttgaacccagaaggaggccccaattgggtgcgcaactttgttgacagccccatcattgtggatatcacaaaggacaccttctacaaacagcctatgttctatcatctggggcactttagcaagttcattccagagggttcccagagagtaggcttggttgcctcacagaagaatgatctggatgctgtggcactcctgcatcctgacgggagtgcagtggtggtagtactgaacaggtctagcaaagatgttcccttgactatcaaagacccagctgtgggctttctggaaaccatttcccctggatactctatccacacctatctctggagaagacagtaatga

SEQ ID NO: 270 - protein, 536 aa, synthetic construct
  REGION 1..536: note = Variant of B-Glucocerebrosidase
MEFSSPSREECPKPLSRVSIMAGSLTGLLLLQAVSWASGARPCIPKSFGYSSVVCVCNATYCDSLDPLTLPALGTFSRYESTRSGRRMELSMGPIQANHTGTGLLLTLQPEQKFQKVKGFGGAMTDAAALNILALSPPAQNLLLKSYFSEEGIEYNIIRVPMASCDFSIRTYTYADTPDDFQLHNFSLPEEDTKLKIPLIHRALQLSQRPVSLFASPWTSPTWLKTNGAVNGKGSLKGQPGDIYHQTWARYFVKFLDAYAEHKLQFWAVTAENEPSAGLLSGYPFQCLGFTPEHQRDFIARDLGPTLANSTHHNVRLLILDDQRLLLPHWAKVVLTDPEAAKYVHGIAVHWYLDFLAPAKATLGETHRLFPNTMLFASEACVGSKFWEQSVRLGSWDRGMQYSHSIITNLLYHVVGWTDWNLALNPEGGPNWVRNFVDSPIIVDITKDTFYKQPMFYHLGHFSKFIPEGSQRVGLVASQKNDLDAVALLHPDGSAVVVVLNRSSKDVPLTIKDPAVGFLETISPGYSIHTYLWRRQ

SEQ ID NO: 271 - DNA, 1614 bp, synthetic construct
  misc_feature 1..1614: note = Variant of B-Glucocerebrosidase
  source 1..1614: mol_type = other DNA
atggagttttcttctcctagtagagaagaatgccccaagccactgagcagggtgagcatcatggctggatccctcacagggctgcttcttttgcaggcagtctcatgggcctctggagccaggccctgtattcccaagtcattcggctactcctcagtggtgtgtgtatgcaatgccacctattgtgacagtttcgatcctccaactctccctgctctgggtaccttctcccggtatgagagcacaagaagtggaagacgcatggagctctcaatgggccctatacaggctaaccacactgggacaggtctgctgctgaccctccaacctgaacagaagtttcagaaagtcaagggatttggaggagccatgactgatgcagcagcactcaacatcttggccctgtctccaccagcccaggacctgctgttgaagtcctacttctcagaggaggggattgggtacaacatcatccgggttcccatggctagctgtgacttctccattaggacctatacatacgctgacacccccgatgattttcagctccataatttcagtctccctgaagaagacaccaaactgaagatacctctgattcacagagccttgcaactgtcccaaaggccagtgagcctcttcgcttctccctggactagtcctacatggctgaagactaatggtgctgttaatgggaaaggctccctgaaaggacagccaggtgacatatatcatcagacatgggcccgctactttgtgaaattccttgatgcctatgcagagcacaagctccaattctgggcagtcaccgcagaaaacgagccctcagctgggctgctgtctggctacccctttcagtgcttgggctttactcctgagcatcaacgggacttcattgcccgggatttggggccaacactggccaacagcacccaccacaatgtaagactcctcatgctggatgaccagaggctgctgctccctcattgggccaaggtggtgttgacagacccagaagctgccaaatatgttcatggcatcgctgtccactggtacctggattttttggcccctgcaaaggctactctgggagagacccacagactcttccccaataccatgctgtttgcatcagaagcctgcgtggggagcaaattctgggagcagtctgttaggctgggttcctgggatcggggcatgcaatattcccatagtataataactaacctcctctaccacgtggtaggatggacagactggaatctggctttgaacccagaaggaggccccaattgggtgcgcaactttgttgacagccccatcattgtggatatcacaaaggacaccttctacaaacagcctatgttctatcatctggggcactttagcaagttcattccagagggttcccagagagtaggcttggttgcctcacagaagaatgatctggatgctgtggcactcctgcatcctgacgggagtgcagtggtggtagtactgaacaggtctagcaaagatgttcccttgactatcaaagacccagctgtgggctttctggaaaccatttcccctggatactctatccacacctatctctggagaagacagtaatga

SEQ ID NO: 272 - protein, 536 aa, synthetic construct
  REGION 1..536: note = Variant of B-Glucocerebrosidase
MEFSSPSREECPKPLSRVSIMAGSLTGLLLLQAVSWASGARPCIPKSFGYSSVVCVCNATYCDSFDPPTLPALGTFSRYESTRSGRRMELSMGPIQANHTGTGLLLTLQPEQKFQKVKGFGGAMTDAAALNILALSPPAQDLLLKSYFSEEGIGYNIIRVPMASCDFSIRTYTYADTPDDFQLHNFSLPEEDTKLKIPLIHRALQLSQRPVSLFASPWTSPTWLKTNGAVNGKGSLKGQPGDIYHQTWARYFVKFLDAYAEHKLQFWAVTAENEPSAGLLSGYPFQCLGFTPEHQRDFIARDLGPTLANSTHHNVRLLMLDDQRLLLPHWAKVVLTDPEAAKYVHGIAVHWYLDFLAPAKATLGETHRLFPNTMLFASEACVGSKFWEQSVRLGSWDRGMQYSHSIITNLLYHVVGWTDWNLALNPEGGPNWVRNFVDSPIIVDITKDTFYKQPMFYHLGHFSKFIPEGSQRVGLVASQKNDLDAVALLHPDGSAVVVVLNRSSKDVPLTIKDPAVGFLETISPGYSIHTYLWRRQ

SEQ ID NO: 273 - DNA, 1614 bp, synthetic construct
  misc_feature 1..1614: note = Variant of B-Glucocerebrosidase
  source 1..1614: mol_type = other DNA
atggagttttcttctcctagtagagaagaatgccccaagccactgagcagggtgagcatcatggctggatccctcacagggctgcttcttttgcaggcagtctcatgggcctctggagccaggccctgtattcccaagtcattcggctactcctcagtggtgtgtgtatgcaatgccacctattgtgacagtttcgatcctgtcactctccctgctctgggtaccttctcccggtatgagagcacaagaagtggaagacgcatggagctctcaatgggccctatacaggctaaccacactgggacaggtctgctgctgaccctccaacctgaacagaagtttcagaaagtcaagggatttggaggagccatgactgatgcagcagcactcaacatcttggccctgtctccaccagcccagaatctgctgttgaagtcctacttctcagaggaggggattggctacaacatcatccgggttcccatggctagctgtgacttctccattaggacctatacatacgctgacacccccgatgattttcagctccataatttcagtctccctgaagaagacaccaaactgaagatacctctgattcacagagccttgcaactgtcccaaaggccagtgagcctcttcgcttctccctggactagtcctacatggctgaagactaatggtgctctgaatgggaaaggctccctgaaaggacagccaggtgacatatatcatcagacatgggcccgctactttgtgaaattccttgatgcctatgcagagcacaagctccaattctgggcagtcaccgcagaaaacgagccctcagctgggctgctgtctggctacccctttcagtgcttgggctttactcctgagcatcaacgggacttcattgcccgggatttggggccaacactggccaacagcacccaccacaatgtaagactcctcatgctggatgaccagaggctgctgctccctcattgggccaaggtggtgttgacagacccagaagctgccaaatatgttcatggcatcgctgtccactggtacctggattttttggcccctgcaaaggctactctgggagagacccacagactcttccccaataccatgctgtttgcatcagaagcctgcgtggggagcaaattctgggagcagtctgttaggctgggttcctgggatcggggcatgcaatattcccatagtataataactaacctcctctaccacgtggtaggatggacagactggaatctggctttgaacccagaaggaggccccaattgggtgcgcaactttgttgacagccccatcattgtggatatcacaaaggacaccttctacaaacagcctatgttctatcatctggggcactttagcaagttcattccagagggttcccagagagtaggcttggttgcctcacagaagaatgatctggatgctgtggcactcctgcatcctgacgggagtgcagtggtggtagtactgaacaggtctagcaaagatgttcccttgactatcaaagacccagctgtgggctttctggaaaccatttcccctggatactctatccacacctatctctggagaagacagtaatga

SEQ ID NO: 274 - protein, 536 aa, synthetic construct
  REGION 1..536: note = Variant of B-Glucocerebrosidase
MEFSSPSREECPKPLSRVSIMAGSLTGLLLLQAVSWASGARPCIPKSFGYSSVVCVCNATYCDSFDPVTLPALGTFSRYESTRSGRRMELSMGPIQANHTGTGLLLTLQPEQKFQKVKGFGGAMTDAAALNILALSPPAQNLLLKSYFSEEGIGYNIIRVPMASCDFSIRTYTYADTPDDFQLHNFSLPEEDTKLKIPLIHRALQLSQRPVSLFASPWTSPTWLKTNGALNGKGSLKGQPGDIYHQTWARYFVKFLDAYAEHKLQFWAVTAENEPSAGLLSGYPFQCLGFTPEHQRDFIARDLGPTLANSTHHNVRLLMLDDQRLLLPHWAKVVLTDPEAAKYVHGIAVHWYLDFLAPAKATLGETHRLFPNTMLFASEACVGSKFWEQSVRLGSWDRGMQYSHSIITNLLYHVVGWTDWNLALNPEGGPNWVRNFVDSPIIVDITKDTFYKQPMFYHLGHFSKFIPEGSQRVGLVASQKNDLDAVALLHPDGSAVVVVLNRSSKDVPLTIKDPAVGFLETISPGYSIHTYLWRRQ

SEQ ID NO: 275 - DNA, 1614 bp, synthetic construct
  misc_feature 1..1614: note = Variant of B-Glucocerebrosidase
  source 1..1614: mol_type = other DNA
atggagttttcttctcctagtagagaagaatgccccaagccactgagcagggtgagcatcatggctggatccctcacagggctgcttcttttgcaggcagtctcatgggcctctggagccaggccctgtattcccaagtcattcggctactcctcagtggtgtgtgtatgcaatgccacctattgtgacagtttcgatcctccaactctccctgctctgggtaccttctcccggtatgagagcacaagaagtggaagacgcatggagctctcaatgggccctatacaggctaaccacactggtacaggtctgctgctgaccctccaacctgaacagaagtttcagaaagtcaagggatttggaggagccatgactgatgcagcagcactcaacatcttggccctgtctccaccagcccagaatctgctgttgaagtcctacttctcagaggaggggattggctacaacatcatccgggttcccatggctagctgtgacttctccattaggacctatacatacgctgacacccccgatgattttcagctccataatttcagtctccctgaagaagacaccaaactgaagatacctctgattcacagagccttgcaactgtcccaaaggccagtgagcctcttcgcttctccctggactagtcctacatggctgaagactaatggtgctgttaatgggaaaggctccctgaaaggacagccaggtgacatatatcatcagacatgggcccgctactttgtgaaattccttgatgcctatgcagagcacaagctccaattctgggcagtcaccgcagaaaacgagccctcagctgggctgctgtctggctacccctttcagtgcttgggctttactcctgagcatcaacgggacttcattgcccgggatttggggccaacactggccaacagcacccaccacaatgtaagactcctcatgctggatgaccagaggctgctgctccctcattgggccaaggtggtgttggcagacccagaagctgccaaatatgttcatggcatcgctgtccactggtacctggattttttggcccctgcaaaggctactctgggagagacccacagactcttccccaataccatgctgtttgcatcagaagcctgcgtggggagcaaattctgggagcagtctgttaggctgggttcctgggatcggggcatgcaatattcccatagtataataactaacctcctctaccacgtggtaggatggacagactggaatctggctttgaacccagaaggaggccccaattgggtgcgcaactttgttgacagccccatcattgtggatatcacaaaggacaccttctacaaacagcctatgttctatcatctggggcactttagcaagttcattccagagggttcccagagagtaggcttggttgcctcacagaagaatgatctggatgctgtggcactcctgcatcctgacgggagtgcagtggtggtagtactgaacaggtctagcaaagatgttcccttgactatcaaagacccagctgtgggctttctggaaaccatttcccctggatactctatccacacctatctctggagaagacagtaatga

SEQ ID NO: 276 - protein, 536 aa, synthetic construct
  REGION 1..536: note = Variant of B-Glucocerebrosidase
MEFSSPSREECPKPLSRVSIMAGSLTGLLLLQAVSWASGARPCIPKSFGYSSVVCVCNATYCDSFDPPTLPALGTFSRYESTRSGRRMELSMGPIQANHTGTGLLLTLQPEQKFQKVKGFGGAMTDAAALNILALSPPAQNLLLKSYFSEEGIGYNIIRVPMASCDFSIRTYTYADTPDDFQLHNFSLPEEDTKLKIPLIHRALQLSQRPVSLFASPWTSPTWLKTNGAVNGKGSLKGQPGDIYHQTWARYFVKFLDAYAEHKLQFWAVTAENEPSAGLLSGYPFQCLGFTPEHQRDFIARDLGPTLANSTHHNVRLLMLDDQRLLLPHWAKVVLADPEAAKYVHGIAVHWYLDFLAPAKATLGETHRLFPNTMLFASEACVGSKFWEQSVRLGSWDRGMQYSHSIITNLLYHVVGWTDWNLALNPEGGPNWVRNFVDSPIIVDITKDTFYKQPMFYHLGHFSKFIPEGSQRVGLVASQKNDLDAVALLHPDGSAVVVVLNRSSKDVPLTIKDPAVGFLETISPGYSIHTYLWRRQ

SEQ ID NO: 277 - DNA, 1614 bp, synthetic construct
  misc_feature 1..1614: note = Variant of B-Glucocerebrosidase
  source 1..1614: mol_type = other DNA
atggagttttcttctcctagtagagaagaatgccccaagccactgagcagggtgagcatcatggctggatccctcacagggctgcttcttttgcaggcagtctcatgggcctctggagccaggccctgtattcccaagtcattcggctactcctcagtggtgtgtgtatgcaatgccacctattgtgacagtttcgatcctccaactctccctgctctgggtaccttctcccggtatgagagcacaagaagtggaagacgcatggagctctcaatgggccctatacaggctaaccacactgggacaggtctgctgctgaccctccaacctgaacagaagtttcagaaagtcaagggatttggaggagccatgactgatgcagcagcactcaacatcttggccctgtctccaccagcccaggacctgctgttgaagtcctacttctcagaggaggggattgggtacaacatcatccgggttcccatggctagctgtgacttctccattaggacctatacatacgctgacacccccgatgattttcagctccataatttcagtctccctgaagaagacaccaaactgaagatacctctgattcacagagccttgcaactgtcccaaaggccagtgagcctcttcgcttctccctggactagtcctacatggctgaagactaatggtgctctgaatgggaaaggctccctgaaaggacagccaggtgacatatatcatcagacatgggcccgctactttgtgaaattccttgatgcctatgcagagcacaagctccaattctgggcagtcaccgcagaaaacgagccctcagctgggctgctgtctggctacccctttcagtgcttgggctttactcctgagcatcaacgggacttcattgcccgggatttggggccaacactggccaacagcacccaccacaatgtaagactcctcatgctggatgaccagaggctgctgctccctcattgggccaaggtggtgttgacagacccagaagctgccaaatatgttcatggcatcgctgtccactggtacctggattttttggcccctgcaaaggctactctgggagagacccacagactcttccccaataccatgctgtttgcatcagaagcctgcgtggggagcaaattctgggagcagtctgttaggctgggttcctgggatcggggcatgcaatattcccatagtataataactaacctcctctaccacgtggtaggatggacagactggaatctggctttgaacccagaaggaggccccaattgggtgcgcaactttgttgacagccccatcattgtggatatcacaaaggacaccttctacaaacagcctatgttctatcatctggggcactttagcaagttcattccagagggttcccagagagtaggcttggttgcctcacagaagaatgatctggatgctgtggcactcctgcatcctgacgggagtgcagtggtggtagtactgaacaggtctagcaaagatgttcccttgactatcaaagacccagctgtgggctttctggaaaccatttcccctggatactctatccacacctatctctggagaagacagtaatga

SEQ ID NO: 278 - protein, 536 aa, synthetic construct
  REGION 1..536: note = Variant of B-Glucocerebrosidase
MEFSSPSREECPKPLSRVSIMAGSLTGLLLLQAVSWASGARPCIPKSFGYSSVVCVCNATYCDSFDPPTLPALGTFSRYESTRSGRRMELSMGPIQANHTGTGLLLTLQPEQKFQKVKGFGGAMTDAAALNILALSPPAQDLLLKSYFSEEGIGYNIIRVPMASCDFSIRTYTYADTPDDFQLHNFSLPEEDTKLKIPLIHRALQLSQRPVSLFASPWTSPTWLKTNGALNGKGSLKGQPGDIYHQTWARYFVKFLDAYAEHKLQFWAVTAENEPSAGLLSGYPFQCLGFTPEHQRDFIARDLGPTLANSTHHNVRLLMLDDQRLLLPHWAKVVLTDPEAAKYVHGIAVHWYLDFLAPAKATLGETHRLFPNTMLFASEACVGSKFWEQSVRLGSWDRGMQYSHSIITNLLYHVVGWTDWNLALNPEGGPNWVRNFVDSPIIVDITKDTFYKQPMFYHLGHFSKFIPEGSQRVGLVASQKNDLDAVALLHPDGSAVVVVLNRSSKDVPLTIKDPAVGFLETISPGYSIHTYLWRRQ

SEQ ID NO: 279 - DNA, 1614 bp, synthetic construct
  misc_feature 1..1614: note = Variant of B-Glucocerebrosidase
  source 1..1614: mol_type = other DNA
atggagttttcttctcctagtagagaagaatgccccaagccactgagcagggtgagcatcatggctggatccctcacagggctgcttcttttgcaggcagtctcatgggcctctggagccaggccctgtattcccaagtcattcggctactcctcagtggtgtgtgtatgcaatgccacctattgtgacagtttcgatcctgtcactctccctgctctgggtaccttctcccggtatgagagcacaagaagtggaagacgcatggagctctcaatgggccctatacaggctaaccacactgggacaggtctgctgctgaccctccaacctgaacagaagtttcagaaagtcaagggatttggaggagccatgactgatgcagcagcactcaacatcttggccctgtctccaccagcccagaatctgctgttgaagtcctacttctcagaggaggggattgagtacaacatcatccgggttcccatggctagctgtgacttctccattaggacctatacatacgctgacacccccgatgattttcagctccataatttcagtctccctgaagaagacaccaaactgaagatacctctgattcacagagccttgcaactgtcccaaaggccagtgagcctcttcgcttctccctggactagtcctacatggctgaagactaatggtgctgttaatgggaaaggctccctgaaaggacagccaggtgacatatatcatcagacatgggcccgctactttgtgaaattccttgatgcctatgcagagcacaagctccaattctgggcagtcaccgcagaaaacgagccctcagctgggctgctgtctggctacccctttcagtgcttgggctttactcctgagcatcaacgggacttcattgcccgggatttggggccaacactggccaacagcacccaccacaatgtaagactcctcatgctggatgaccagaggctgctgctccctcattgggccaaggtggtgttggcagacccagaagctgccaaatatgttcatggcatcgctgtccactggtacctggattttttggcccctgcaaaggctactctgggagagacccacagactcttccccaataccatgctgtttgcatcagaagcctgcgtggggagcaaattctgggagcagtctgttaggctgggttcctgggatcggggcatgcaatattcccatagtataataactaacctcctctaccacgtggtaggatggacagactggaatctggctttgaacccagaaggaggccccaattgggtgcgcaactttgttgacagccccatcattgtggatatcacaaaggacaccttctacaaacagcctatgttctatcatctggggcactttagcaagttcattccagagggttcccagagagtaggcttggttgcctcacagaagaatgatctggatgctgtggcactcctgcatcctgacgggagtgcagtggtggtagtactgaacaggtctagcaaagatgttcccttgactatcaaagacccagctgtgggctttctggaaaccatttcccctggatactctatccacacctatctctggagaagacagtaatga

SEQ ID NO: 280 - protein, 536 aa, synthetic construct
  REGION 1..536: note = Variant of B-Glucocerebrosidase
MEFSSPSREECPKPLSRVSIMAGSLTGLLLLQAVSWASGARPCIPKSFGYSSVVCVCNATYCDSFDPVTLPALGTFSRYESTRSGRRMELSMGPIQANHTGTGLLLTLQPEQKFQKVKGFGGAMTDAAALNILALSPPAQNLLLKSYFSEEGIEYNIIRVPMASCDFSIRTYTYADTPDDFQLHNFSLPEEDTKLKIPLIHRALQLSQRPVSLFASPWTSPTWLKTNGAVNGKGSLKGQPGDIYHQTWARYFVKFLDAYAEHKLQFWAVTAENEPSAGLLSGYPFQCLGFTPEHQRDFIARDLGPTLANSTHHNVRLLMLDDQRLLLPHWAKVVLADPEAAKYVHGIAVHWYLDFLAPAKATLGETHRLFPNTMLFASEACVGSKFWEQSVRLGSWDRGMQYSHSIITNLLYHVVGWTDWNLALNPEGGPNWVRNFVDSPIIVDITKDTFYKQPMFYHLGHFSKFIPEGSQRVGLVASQKNDLDAVALLHPDGSAVVVVLNRSSKDVPLTIKDPAVGFLETISPGYSIHTYLWRRQ

SEQ ID NO: 281 - DNA, 1614 bp, synthetic construct
  misc_feature 1..1614: note = Variant of B-Glucocerebrosidase
  source 1..1614: mol_type = other DNA
atggagttttcttctcctagtagagaagaatgccccaagccactgagcagggtgagcatcatggctggatccctcacagggctgcttcttttgcaggcagtctcatgggcctctggagccaggccctgtattcccaagtcattcggctactcctcagtggtgtgtgtatgcaatgccacctattgtgacagtctcgatcctctcactctccctgctctgggtaccttctcccggtatgagagcacaagaagtggaagacgcatggagctctcaatgggccctatacaggctaaccacactgggacaggtctgctgctgaccctccaacctgaacagaagtttcagaaagtcaagggatttggaggagccatgactgatgcagcagcactcaacatcttggccctgtctccaccagcccagaacctgctgttgaagtcctacttctcagaggaggggattggctacaacatcatccgggttcccatggctagctgtgacttctccattaggacctatacatacgctgacacccccgatgattttcagctccataatttcagtctccctgaagaagacaccaaactgaagatacctctgattcacagagccttgcaactgtcccaaaggccagtgagcctcttcgcttctccctggactagtcctacatggctgaagactaatggtgctgtgaatgggaaaggctccctgaaaggacagccaggtgacatatatcatcagacatgggcccgctactttgtgaaattccttgatgcctatgcagagcacaagctccaattctgggcagtcaccgcagaaaacgagccctcagctgggctgctgtctggctacccctttcagtgcttgggctttactcctgagcatcaacgggacttcattgcccgggatttggggccaacactggccaacagcacccaccacaatgtaagactcctcatgctggatgaccagaggctgctgctccctcattgggccaaggtggtgttgacagacccagaagctgccaaatatgttcatggcatcgctgtccactggtacctggattttttggcccctgcaaaggctactctgggagagacccacagactcttccccaataccatgctgtttgcatcagaagcctgcgtggggagcaaattctgggagcagtctgttaggctgggttcctgggatcggggcatgcaatattcccatagtataataactaacctcctctaccacgtggtaggatggacagactggaatctggctttgaacccagaaggaggccccaattgggtgcgcaactttgttgacagccccatcattgtggatatcacaaaggacaccttctacaaacagcctatgttctatcatctggggcactttagcaagttcattccagagggttcccagagagtaggcttggttgcctcacagaagaatgatctggatgctgtggcactcctgcatcctgacgggagtgcagtggtggtagtactgaacaggtctagcaaagatgttcccttgactatcaaagacccagctgtgggctttctggaaaccatttcccctggatactctatccacacctatctctggagaagacagtaatga

SEQ ID NO: 282 - protein, 536 aa, synthetic construct
  REGION 1..536: note = Variant of B-Glucocerebrosidase
MEFSSPSREECPKPLSRVSIMAGSLTGLLLLQAVSWASGARPCIPKSFGYSSVVCVCNATYCDSLDPLTLPALGTFSRYESTRSGRRMELSMGPIQANHTGTGLLLTLQPEQKFQKVKGFGGAMTDAAALNILALSPPAQNLLLKSYFSEEGIGYNIIRVPMASCDFSIRTYTYADTPDDFQLHNFSLPEEDTKLKIPLIHRALQLSQRPVSLFASPWTSPTWLKTNGAVNGKGSLKGQPGDIYHQTWARYFVKFLDAYAEHKLQFWAVTAENEPSAGLLSGYPFQCLGFTPEHQRDFIARDLGPTLANSTHHNVRLLMLDDQRLLLPHWAKVVLTDPEAAKYVHGIAVHWYLDFLAPAKATLGETHRLFPNTMLFASEACVGSKFWEQSVRLGSWDRGMQYSHSIITNLLYHVVGWTDWNLALNPEGGPNWVRNFVDSPIIVDITKDTFYKQPMFYHLGHFSKFIPEGSQRVGLVASQKNDLDAVALLHPDGSAVVVVLNRSSKDVPLTIKDPAVGFLETISPGYSIHTYLWRRQ

SEQ ID NO: 283 - DNA, 1614 bp, synthetic construct
  misc_feature 1..1614: note = Variant of B-Glucocerebrosidase
  source 1..1614: mol_type = other DNA
atggagttttcttctcctagtagagaagaatgccccaagccactgagcagggtgagcatcatggctggatccctcacagggctgcttcttttgcaggcagtctcatgggcctctggagccaggccctgtattcccaagtcattcggctactcctcagtggtgtgtgtatgcaatgccacctattgtgacagtctcgatcctgtcactctccctgctctgggtaccttctcccggtatgagagcacaagaagtggaagacgcatggagctctcaatgggccctatacaggctaaccgcactgggacaggtctgctgctgaccctccaacctgaacagaagtttcagaaagtcaagggatttggaggagccatgactgatgcagcagcactcaacatcttggccctgtctccaccagcccagaatctgctgttgaagtcctacttctcagaggaggggattggctacaacatcatccgggttcccatggctagctgtgacttctccattaggacctatacatacgctgacacccccgatgattttcagctccataatttcagtctccctgaagaagacaccaaactgaagatacctctgattcacagagccttgcaactgtcccaaaggccagtgagcctcttcgcttctccctggactagtcctacatggctgaagactaatggtgctgtgaatgggaaaggctccctgaaaggacagccaggtgacatatatcatcagacatgggcccgctactttgtgaaattccttgatgcctatgcagagcacaagctccaattctgggcagtcaccgcagaaaacgagccctcagctgggctgctgtctggctacccctttcagtgcttgggctttactcctgagcatcaacgggacttcattgcccgggatttggggccaacactggccaacagcacccaccacaatgtaagactcctcattctggatgaccagaggctgctgctccctcattgggccaaggtggtgttgacagacccagaagctgccaaatatgttcatggcatcgctgtccactggtacctggattttttggcccctgcaaaggctactctgggagagacccacagactcttccccaataccatgctgtttgcatcagaagcctgcgtggggagcaaattctgggagcagtctgttaggctgggttcctgggatcggggcatgcaatattcccatagtataataactaacctcctctaccacgtggtaggatggacagactggaatctggctttgaacccagaaggaggccccaattgggtgcgcaactttgttgacagccccatcattgtggatatcacaaaggacaccttctacaaacagcctatgttctatcatctggggcactttagcaagttcattccagagggttcccagagagtaggcttggttgcctcacagaagaatgatctggatgctgtggcactcctgcatcctgacgggagtgcagtggtggtagtactgaacaggtctagcaaagatgttcccttgactatcaaagacccagctgtgggctttctggaaaccatttcccctggatactctatccacacctatctctggagaagacagtaatga

SEQ ID NO: 284 - protein, 536 aa, synthetic construct
  REGION 1..536: note = Variant of B-Glucocerebrosidase
MEFSSPSREECPKPLSRVSIMAGSLTGLLLLQAVSWASGARPCIPKSFGYSSVVCVCNATYCDSLDPVTLPALGTFSRYESTRSGRRMELSMGPIQANRTGTGLLLTLQPEQKFQKVKGFGGAMTDAAALNILALSPPAQNLLLKSYFSEEGIGYNIIRVPMASCDFSIRTYTYADTPDDFQLHNFSLPEEDTKLKIPLIHRALQLSQRPVSLFASPWTSPTWLKTNGAVNGKGSLKGQPGDIYHQTWARYFVKFLDAYAEHKLQFWAVTAENEPSAGLLSGYPFQCLGFTPEHQRDFIARDLGPTLANSTHHNVRLLILDDQRLLLPHWAKVVLTDPEAAKYVHGIAVHWYLDFLAPAKATLGETHRLFPNTMLFASEACVGSKFWEQSVRLGSWDRGMQYSHSIITNLLYHVVGWTDWNLALNPEGGPNWVRNFVDSPIIVDITKDTFYKQPMFYHLGHFSKFIPEGSQRVGLVASQKNDLDAVALLHPDGSAVVVVLNRSSKDVPLTIKDPAVGFLETISPGYSIHTYLWRRQ

SEQ ID NO: 285 - DNA, 1614 bp, synthetic construct
  misc_feature 1..1614: note = Variant of B-Glucocerebrosidase
  source 1..1614: mol_type = other DNA
atggagttttcttctcctagtagagaagaatgccccaagccactgagcagggtgagcatcatggctggatccctcacagggctgcttcttttgcaggcagtctcatgggcctctggagccaggccctgtattcccaagtcattcggctactcctcagtggtgtgtgtatgcaatgccacctattgtgacagtttcgatcctcccactctccctgctctgggtaccttctcccggtatgagagcacaagaagtggaagacgcatggagctctcaatgggccctatacaggctaaccacactgggacaggtctgctgctgaccctccaacctgaacagaagtttcagaaagtcaagggatttggaggagccatgactgatgcagcagcactcaacatcttggccctgtctccaccagcccagaatctgctgttgaagtcctacttctcagaggaggggattgagtacaacatcatccgggttcccatggctagctgtgacttctccattaggacctatacatacgctgacacccccgatgattttcagctccataatttcagtctccctgaagaagacaccaaactgaagatacctctgattcacagagccttgcaactgtcccaaaggccagtgagcctcttcgcttctccctggactagtcctacatggctgaagactaatggtgctgttaatgggaaaggctccctgaaaggacagccaggtgacatatatcatcagacatgggcccgctactttgtgaaattccttgatgcctatgcagagcacaagctccaattctgggcagtcaccgcagaaaacgagccctcagctgggctgctgtctggctacccctttcagtgcttgggctttactcctgagcatcaacgggacttcattgcccgggatttggggccaacactggccaacagcacccaccacaatgtaagactcctcatgctggatgaccagaggctgctgctccctcattgggccaaggtggtgttgacagacccagaagctgccaaatatgttcatggcatcgctgtccactggtacctggattttttggcccctgcaaaggctactctgggagagacccacagactcttccccaataccatgctgtttgcatcagaagcctgcgtggggagcaaattctgggagcagtctgttaggctgggttcctgggatcggggcatgcaatattcccatagtataataactaacctcctctaccacgtggtaggatggacagactggaatctggctttgaacccagaaggaggccccaattgggtgcgcaactttgttgacagccccatcattgtggatatcacaaaggacaccttctacaaacagcctatgttctatcatctggggcactttagcaagttcattccagagggttcccagagagtaggcttggttgcctcacagaagaatgatctggatgctgtggcactcctgcatcctgacgggagtgcagtggtggtagtactgaacaggtctagcaaagatgttcccttgactatcaaagacccagctgtgggctttctggaaaccatttcccctggatactctatccacacctatctctggagaagacagtaatga

SEQ ID NO: 286 - protein, 536 aa, synthetic construct
  REGION 1..536: note = Variant of B-Glucocerebrosidase
MEFSSPSREECPKPLSRVSIMAGSLTGLLLLQAVSWASGARPCIPKSFGYSSVVCVCNATYCDSFDPPTLPALGTFSRYESTRSGRRMELSMGPIQANHTGTGLLLTLQPEQKFQKVKGFGGAMTDAAALNILALSPPAQNLLLKSYFSEEGIEYNIIRVPMASCDFSIRTYTYADTPDDFQLHNFSLPEEDTKLKIPLIHRALQLSQRPVSLFASPWTSPTWLKTNGAVNGKGSLKGQPGDIYHQTWARYFVKFLDAYAEHKLQFWAVTAENEPSAGLLSGYPFQCLGFTPEHQRDFIARDLGPTLANSTHHNVRLLMLDDQRLLLPHWAKVVLTDPEAAKYVHGIAVHWYLDFLAPAKATLGETHRLFPNTMLFASEACVGSKFWEQSVRLGSWDRGMQYSHSIITNLLYHVVGWTDWNLALNPEGGPNWVRNFVDSPIIVDITKDTFYKQPMFYHLGHFSKFIPEGSQRVGLVASQKNDLDAVALLHPDGSAVVVVLNRSSKDVPLTIKDPAVGFLETISPGYSIHTYLWRRQ

SEQ ID NO: 287 - DNA, 1614 bp, synthetic construct
  misc_feature 1..1614: note = Variant of B-Glucocerebrosidase
  source 1..1614: mol_type = other DNA
atggagttttcttctcctagtagagaagaatgccccaagccactgagcagggtgagcatcatggctggatccctcacagggctgcttcttttgcaggcagtctcatgggcctctggagccaggccctgtattcccaagtcattcggctactcctcagtggtgtgtgtatgcaatgccacctattgtgacagtttcgatcctccaactctccctgctctgggtaccttctcccggtatgagagcacaagaagtggaagacgcatggagctctcaatgggccctatacaggctaaccacactgggacaggtctgctgctgaccctccaacctgaacagaagtttcagaaagtcaagggatttggaggagccatgactgatgcagcagcactcaacatcttggccctgtctccaccagcccagaatctgctgttgaagtcctacttctcagaggaggggattggctacaacatcatccgggttcccatggctagctgtgacttctccattaggacctatacatacgctgacacccccgatgattttcagctccataatttcagtctccctgaagaagacaccaaactgaagatacctctgattcacagagccttgcaactgtcccaaaggccagtgagcctcttcgcttctccctggactagtcctacatggctgaagactaatggtgctgtgaatgggaaaggctccctgaaaggacagccaggtgacatatatcatcagacatgggcccgctactttgtgaaattccttgatgcctatgcagagcacaagctccaattctgggcagtcaccgcagaaaacgagccctcagctgggctgctgtctggctacccctttcagtgcttgggctttactcctgagcatcaacgggacttcattgcccgggatttggggccaacactggccaacagcacccaccacaatgtaagactcctcattctggatgaccagaggctgctgctccctcattgggccaaggtggtgttgacagacccagaagctgccaaatatgttcatggcatcgctgtccactggtacctggattttttggcccctgcaaaggctactctgggagagacccacagactcttccccaataccatgctgtttgcatcagaagcctgcgtggggagcaaattctgggagcagtctgttaggctgggttcctgggatcggggcatgcaatattcccatagtataataactaacctcctctaccacgtggtaggatggacagactggaatctggctttgaacccagaaggaggccccaattgggtgcgcaactttgttgacagccccatcattgtggatatcacaaaggacaccttctacaaacagcctatgttctatcatctggggcactttagcaagttcattccagagggttcccagagagtaggcttggttgcctcacagaagaatgatctggatgctgtggcactcctgcatcctgacgggagtgcagtggtggtagtactgaacaggtctagcaaagatgttcccttgactatcaaagacccagctgtgggctttctggaaaccatttcccctggatactctatccacacctatctctggagaagacagtaatga

SEQ ID NO: 288 - protein, 536 aa, synthetic construct
  REGION 1..536: note = Variant of B-Glucocerebrosidase
MEFSSPSREECPKPLSRVSIMAGSLTGLLLLQAVSWASGARPCIPKSFGYSSVVCVCNATYCDSFDPPTLPALGTFSRYESTRSGRRMELSMGPIQANHTGTGLLLTLQPEQKFQKVKGFGGAMTDAAALNILALSPPAQNLLLKSYFSEEGIGYNIIRVPMASCDFSIRTYTYADTPDDFQLHNFSLPEEDTKLKIPLIHRALQLSQRPVSLFASPWTSPTWLKTNGAVNGKGSLKGQPGDIYHQTWARYFVKFLDAYAEHKLQFWAVTAENEPSAGLLSGYPFQCLGFTPEHQRDFIARDLGPTLANSTHHNVRLLILDDQRLLLPHWAKVVLTDPEAAKYVHGIAVHWYLDFLAPAKATLGETHRLFPNTMLFASEACVGSKFWEQSVRLGSWDRGMQYSHSIITNLLYHVVGWTDWNLALNPEGGPNWVRNFVDSPIIVDITKDTFYKQPMFYHLGHFSKFIPEGSQRVGLVASQKNDLDAVALLHPDGSAVVVVLNRSSKDVPLTIKDPAVGFLETISPGYSIHTYLWRRQ

SEQ ID NO: 289 - DNA, 1614 bp, synthetic construct
  misc_feature 1..1614: note = Variant of B-Glucocerebrosidase
  source 1..1614: mol_type = other DNA
atggagttttcttctcctagtagagaagaatgccccaagccactgagcagggtgagcatcatggctggatccctcacagggctgcttcttttgcaggcagtctcatgggcctctggagccaggccctgtattcccaagtcattcggctactcctcagtggtgtgtgtatgcaatgccacctattgtgacagtttcgatcctccaactctccctgctctgggtaccttctcccggtatgagagcacaagaagtggaagacgcatggagctctcaatgggccctatacaggctaaccacactgggacaggtctgctgctgaccctccaacctgaacagaagtttcagaaagtcaagggatttggaggagccatgactgatgcagcagcactcaacatcttggccctgtctccaccagcccagaatctgctgttgaagtcctacttctcagaggaggggattggctacaacatcatccgggttcccatggctagctgtgacttctccattaggacctatacatacgctgacacccccgatgattttcagctccataatttcagtctccctgaagaagacaccaaactgaagatacctctgattcacagagccttgcaactgtcccaaaggccagtgagcctcttcgcttctccctggactagtcctacatggctgaagactaatggtgctctgaatgggaaaggctccctgaaaggacagccaggtgacatatatcatcagacatgggcccgctactttgtgaaattccttgatgcctatgcagagcacaagctccaattctgggcagtcaccgcagaaaacgagccctcagctgggctgctgtctggctacccctttcagtgcttgggctttactcctgagcatcaacgggacttcattgcccgggatttggggccaacactggccaacagcacccaccacaatgtaagactcctcattctggatgaccagaggctgctgctccctcattgggccaaggtggtgttgacagacccagaagctgccaaatatgttcatggcatcgctgtccactggtacctggattttttggcccctgcaaaggctactctgggagagacccacagactcttccccaataccatgctgtttgcatcagaagcctgcgtggggagcaaattctgggagcagtctgttaggctgggttcctgggatcggggcatgcaatattcccatagtataataactaacctcctctaccacgtggtaggatggacagactggaatctggctttgaacccagaaggaggccccaattgggtgcgcaactttgttgacagccccatcattgtggatatcacaaaggacaccttctacaaacagcctatgttctatcatctggggcactttagcaagttcattccagagggttcccagagagtaggcttggttgcctcacagaagaatgatctggatgctgtggcactcctgcatcctgacgggagtgcagtggtggtagtactgaacaggtctagcaaagatgttcccttgactatcaaagacccagctgtgggctttctggaaaccatttcccctggatactctatccacacctatctctggagaagacagtaatga

SEQ ID NO: 290 - protein, 536 aa, synthetic construct
  REGION 1..536: note = Variant of B-Glucocerebrosidase
MEFSSPSREECPKPLSRVSIMAGSLTGLLLLQAVSWASGARPCIPKSFGYSSVVCVCNATYCDSFDPPTLPALGTFSRYESTRSGRRMELSMGPIQANHTGTGLLLTLQPEQKFQKVKGFGGAMTDAAALNILALSPPAQNLLLKSYFSEEGIGYNIIRVPMASCDFSIRTYTYADTPDDFQLHNFSLPEEDTKLKIPLIHRALQLSQRPVSLFASPWTSPTWLKTNGALNGKGSLKGQPGDIYHQTWARYFVKFLDAYAEHKLQFWAVTAENEPSAGLLSGYPFQCLGFTPEHQRDFIARDLGPTLANSTHHNVRLLILDDQRLLLPHWAKVVLTDPEAAKYVHGIAVHWYLDFLAPAKATLGETHRLFPNTMLFASEACVGSKFWEQSVRLGSWDRGMQYSHSIITNLLYHVVGWTDWNLALNPEGGPNWVRNFVDSPIIVDITKDTFYKQPMFYHLGHFSKFIPEGSQRVGLVASQKNDLDAVALLHPDGSAVVVVLNRSSKDVPLTIKDPAVGFLETISPGYSIHTYLWRRQ

SEQ ID NO: 291 - DNA, 1614 bp, synthetic construct
  misc_feature 1..1614: note = Variant of B-Glucocerebrosidase
  source 1..1614: mol_type = other DNA
atggagttttcttctcctagtagagaagaatgccccaagccactgagcagggtgagcatcatggctggatccctcacagggctgcttcttttgcaggcagtctcatgggcctctggagccaggccctgtattcccaagtcattcggctactcctcagtggtgtgtgtatgcaatgccacctattgtgacagtttcgatcctctcactctccctgctctgggtaccttctcccggtatgagagcacaagaagtggaagacgcatggagctctcaatgggccctatacaggctaaccacactgggacaggtctgctgctgaccctccaacctgaacagaagtttcagaaagtcaagggatttggaggagccatgactgatgcagcagcactcaacatcttggccctgtctccaccagcccagaatctgctgttgaagtcctacttctcagaggaggggattgagtacaacatcatccgggttcccatggctagctgtgacttctccattaggacctatacatacgctgacacccccgatgattttcagctccataatttcagtctccctgaagaagacaccaaactgaagatacctctgattcacagagccttgcaactgtcccaaaggccagtgagcctcttcgcttctccctggactagtcctacatggctgaagactaatggtgctgttaatgggaaaggctccctgaaaggacagccaggtgacatatatcatcagacatgggcccgctactttgtgaaattccttgatgcctatgcagagcacaagctccaattctgggcagtcaccgcagaaaacgagccctcagctgggctgctgtctggctacccctttcagtgcttgggctttactcctgagcatcaacgggacttcattgcccgggatttggggccaacactggccaacagcacccaccacaatgtaagactcctcatgctggatgaccagaggctgctgctccctcattgggccaaggtggtgttgacagacccagaagctgccaaatatgttcatggcatcgctgtccactggtacctggattttttggcccctgcaaaggctactctgggagagacccacagactcttccccaataccatgctgtttgcatcagaagcctgcgtggggagcaaattctgggagcagtctgttaggctgggttcctgggatcggggcatgcaatattcccatagtataataactaacctcctctaccacgtggtaggatggacagactggaatctggctttgaacccagaaggaggccccaattgggtgcgcaactttgttgacagccccatcattgtggatatcacaaaggacaccttctacaaacagcctatgttctatcatctggggcactttagcaagttcattccagagggttcccagagagtaggcttggttgcctcacagaagaatgatctggatgctgtggcactcctgcatcctgacgggagtgcagtggtggtagtactgaacaggtctagcaaagatgttcccttgactatcaaagacccagctgtgggctttctggaaaccatttcccctggatactctatccacacctatctctggagaagacagtaatga

SEQ ID NO: 292 - protein, 536 aa, synthetic construct
  REGION 1..536: note = Variant of B-Glucocerebrosidase
MEFSSPSREECPKPLSRVSIMAGSLTGLLLLQAVSWASGARPCIPKSFGYSSVVCVCNATYCDSFDPLTLPALGTFSRYESTRSGRRMELSMGPIQANHTGTGLLLTLQPEQKFQKVKGFGGAMTDAAALNILALSPPAQNLLLKSYFSEEGIEYNIIRVPMASCDFSIRTYTYADTPDDFQLHNFSLPEEDTKLKIPLIHRALQLSQRPVSLFASPWTSPTWLKTNGAVNGKGSLKGQPGDIYHQTWARYFVKFLDAYAEHKLQFWAVTAENEPSAGLLSGYPFQCLGFTPEHQRDFIARDLGPTLANSTHHNVRLLMLDDQRLLLPHWAKVVLTDPEAAKYVHGIAVHWYLDFLAPAKATLGETHRLFPNTMLFASEACVGSKFWEQSVRLGSWDRGMQYSHSIITNLLYHVVGWTDWNLALNPEGGPNWVRNFVDSPIIVDITKDTFYKQPMFYHLGHFSKFIPEGSQRVGLVASQKNDLDAVALLHPDGSAVVVVLNRSSKDVPLTIKDPAVGFLETISPGYSIHTYLWRRQ

SEQ ID NO: 293 - DNA, 1614 bp, synthetic construct
  misc_feature 1..1614: note = Variant of B-Glucocerebrosidase
  source 1..1614: mol_type = other DNA
atggagttttcttctcctagtagagaagaatgccccaagccactgagcagggtgagcatcatggctggatccctcacagggctgcttcttttgcaggcagtctcatgggcctctggagccaggccctgtattcccaagtcattcggctactcctcagtggtgtgtgtatgcaatgccacctattgtgacagtttcgatcctcccactctccctgctctgggtaccttctcccggtatgagagcacaagaagtggaagacgcatggagctctcaatgggccctatacaggctaaccgcactgggacaggtctgctgctgaccctccaacctgaacagaagtttcagaaagtcaagggatttggaggagccatgactgatgcagcagcactcaacatcttggccctgtctccaccagcccaggacctgctgttgaagtcctacttctcagaggaggggattggctacaacatcatccgggttcccatggctagctgtgacttctccattaggacctatacatacgctgacacccccgatgattttcagctccataatttcagtctccctgaagaagacaccaaactgaagatacctctgattcacagagccttgcaactgtcccaaaggccagtgagcctcttcgcttctccctggactagtcctacatggctgaagactaatggtgctgttaatgggaaaggctccctgaaaggacagccaggtgacatatatcatcagacatgggcccgctactttgtgaaattccttgatgcctatgcagagcacaagctccaattctgggcagtcaccgcagaaaacgagccctcagctgggctgctgtctggctacccctttcagtgcttgggctttactcctgagcatcaacgggacttcattgcccgggatttggggccaacactggccaacagcacccaccacaatgtaagactcctcattctggatgaccagaggctgctgctccctcattgggccaaggtggtgttgacagacccagaagctgccaaatatgttcatggcatcgctgtccactggtacctggattttttggcccctgcaaaggctactctgggagagacccacagactcttccccaataccatgctgtttgcatcagaagcctgcgtggggagcaaattctgggagcagtctgttaggctgggttcctgggatcggggcatgcaatattcccatagtataataactaacctcctctaccacgtggtaggatggacagactggaatctggctttgaacccagaaggaggccccaattgggtgcgcaactttgttgacagccccatcattgtggatatcacaaaggacaccttctacaaacagcctatgttctatcatctggggcactttagcaagttcattccagagggttcccagagagtaggcttggttgcctcacagaagaatgatctggatgctgtggcactcctgcatcctgacgggagtgcagtggtggtagtactgaacaggtctagcaaagatgttcccttgactatcaaagacccagctgtgggctttctggaaaccatttcccctggatactctatccacacctatctctggagaagacagtaatga

SEQ ID NO: 294 - protein, 536 aa, synthetic construct
  REGION 1..536: note = Variant of B-Glucocerebrosidase
MEFSSPSREECPKPLSRVSIMAGSLTGLLLLQAVSWASGARPCIPKSFGYSSVVCVCNATYCDSFDPPTLPALGTFSRYESTRSGRRMELSMGPIQANRTGTGLLLTLQPEQKFQKVKGFGGAMTDAAALNILALSPPAQDLLLKSYFSEEGIGYNIIRVPMASCDFSIRTYTYADTPDDFQLHNFSLPEEDTKLKIPLIHRALQLSQRPVSLFASPWTSPTWLKTNGAVNGKGSLKGQPGDIYHQTWARYFVKFLDAYAEHKLQFWAVTAENEPSAGLLSGYPFQCLGFTPEHQRDFIARDLGPTLANSTHHNVRLLILDDQRLLLPHWAKVVLTDPEAAKYVHGIAVHWYLDFLAPAKATLGETHRLFPNTMLFASEACVGSKFWEQSVRLGSWDRGMQYSHSIITNLLYHVVGWTDWNLALNPEGGPNWVRNFVDSPIIVDITKDTFYKQPMFYHLGHFSKFIPEGSQRVGLVASQKNDLDAVALLHPDGSAVVVVLNRSSKDVPLTIKDPAVGFLETISPGYSIHTYLWRRQ

SEQ ID NO: 295 - DNA, 1614 bp, synthetic construct
  misc_feature 1..1614: note = Variant of B-Glucocerebrosidase
  source 1..1614: mol_type = other DNA
atggagttttcttctcctagtagagaagaatgccccaagccactgagcagggtgagcatcatggctggatccctcacagggctgcttcttttgcaggcagtctcatgggcctctggagccaggccctgtattcccaagtcattcggctactcctcagtggtgtgtgtatgcaatgccacctattgtgacagtttcgatcctctcactctccctgctctgggtaccttctcccggtatgagagcacaagaagtggaagacgcatggagctctcaatgggccctatacaggctaaccacactgggacaggtctgctgctgaccctccaacctgaacagaagtttcagaaagtcaagggatttggaggagccatgactgatgcagcagcactcaacatcttggccctgtctccaccagcccagaatctgctgttgaagtcctacttctcagaggaggggattgagtacaacatcatccgggttcccatggctagctgtgacttctccattaggacctatacatacgctgacacccccgatgattttcagctccataatttcagtctccctgaagaagacaccaaactgaagatacctctgattcacagagccttgcaactgtcccaaaggccagtgagcctcttcgcttctccctggactagtcctacatggctgaagactaatggtgctgttaatgggaaaggctccctgaaaggacagccaggtgacatatatcatcagacatgggcccgctactttgtgaaattccttgatgcctatgcagagcacaagctccaattctgggcagtcaccgcagaaaacgagccctcagctgggctgctgtctggctacccctttcagtgcttgggctttactcctgagcatcaacgggacttcattgcccgggatttggggccaacactggccaacagcacccaccacaatgtaagactcctcattctggatgaccagaggctgctgctccctcattgggccaaggtggtgttgacagacccagaagctgccaaatatgttcatggcatcgctgtccactggtacctggattttttggcccctgcaaaggctactctgggagagacccacagactcttccccaataccatgctgtttgcatcagaagcctgcgtggggagcaaattctgggagcagtctgttaggctgggttcctgggatcggggcatgcaatattcccatagtataataactaacctcctctaccacgtggtaggatggacagactggaatctggctttgaacccagaaggaggccccaattgggtgcgcaactttgttgacagccccatcattgtggatatcacaaaggacaccttctacaaacagcctatgttctatcatctggggcactttagcaagttcattccagagggttcccagagagtaggcttggttgcctcacagaagaatgatctggatgctgtggcactcctgcatcctgacgggagtgcagtggtggtagtactgaacaggtctagcaaagatgttcccttgactatcaaagacccagctgtgggctttctggaaaccatttcccctggatactctatccacacctatctctggagaagacagtaatga

SEQ ID NO: 296 - protein, 536 aa, synthetic construct
  REGION 1..536: note = Variant of B-Glucocerebrosidase
MEFSSPSREECPKPLSRVSIMAGSLTGLLLLQAVSWASGARPCIPKSFGYSSVVCVCNATYCDSFDPLTLPALGTFSRYESTRSGRRMELSMGPIQANHTGTGLLLTLQPEQKFQKVKGFGGAMTDAAALNILALSPPAQNLLLKSYFSEEGIEYNIIRVPMASCDFSIRTYTYADTPDDFQLHNFSLPEEDTKLKIPLIHRALQLSQRPVSLFASPWTSPTWLKTNGAVNGKGSLKGQPGDIYHQTWARYFVKFLDAYAEHKLQFWAVTAENEPSAGLLSGYPFQCLGFTPEHQRDFIARDLGPTLANSTHHNVRLLILDDQRLLLPHWAKVVLTDPEAAKYVHGIAVHWYLDFLAPAKATLGETHRLFPNTMLFASEACVGSKFWEQSVRLGSWDRGMQYSHSIITNLLYHVVGWTDWNLALNPEGGPNWVRNFVDSPIIVDITKDTFYKQPMFYHLGHFSKFIPEGSQRVGLVASQKNDLDAVALLHPDGSAVVVVLNRSSKDVPLTIKDPAVGFLETISPGYSIHTYLWRRQ

SEQ ID NO: 297 - DNA, 1614 bp, synthetic construct
  misc_feature 1..1614: note = Variant of B-Glucocerebrosidase
  source 1..1614: mol_type = other DNA
atggagttttcttctcctagtagagaagaatgccccaagccactgagcagggtgagcatcatggctggatccctcacagggctgcttcttttgcaggcagtctcatgggcctctggagccaggccctgtattcccaagtcattcggctactcctcagtggtgtgtgtatgcaatgccacctattgtgacagtttcgatcctccaactctccctgctctgggtaccttctcccggtatgagagcacaagaagtggaagacgcatggagctctcaatgggccctatacaggctaaccacactgggacaggtctgctgctgaccctccaacctgaacagaagtttcagaaagtcaagggatttggaggagccatgactgatgcagcagcactcaacatcttggccctgtctccaccagcccagaatctgctgttgaagtcctacttctcagaggaggggattggctacaacatcatccgggttcccatggctagctgtgacttctccattaggacctatacatacgctgacacccccgatgattttcagctccataatttcagtctccctgaagaagacaccaaactgaagatacctctgattcacagagccttgcaactgtcccaaaggccagtgagcctcttcgcttctccctggactagtcctacatggctgaagactaatggtgctgttaatgggaaaggctccctgaaaggacagccaggtgacatatatcatcagacatgggcccgctactttgtgaaattccttgatgcctatgcagagcacaagctccaattctgggcagtcaccgcagaaaacgagccctcagctgggctgctgtctggctacccctttcagtgcttgggctttactcctgagcatcaacgggacttcattgcccgggatttggggccaacactggccaacagcacccaccacaatgtaagactcctcatgctggatgaccagaggctgctgctccctcattgggccaaggtggtgttgacagacccagaagctgccaaatatgttcatggcatcgctgtccactggtacctggattttttggcccctgcaaaggctactctgggagagacccacagactcttccccaataccatgctgtttgcatcagaagcctgcgtggggagcaaattctgggagcagtctgttaggctgggttcctgggatcggggcatgcaatattcccatagtataataactaacctcctctaccacgtggtaggatggacagactggaatctggctttgaacccagaaggaggccccaattgggtgcgcaactttgttgacagccccatcattgtggatatcacaaaggacaccttctacaaacagcctatgttctatcatctggggcactttagcaagttcattccagagggttcccagagagtaggcttggttgcctcacagaagaatgatctggatgctgtggcactcctgcatcctgacgggagtgcagtggtggtagtactgaacaggtctagcaaagatgttcccttcactatcaaagacccagctgtgggctttctcgaaaccatttcccctggatactctatccacacctatctctggagaagacagtaatga

SEQ ID NO: 298 - protein, 536 aa, synthetic construct
  REGION 1..536: note = Variant of B-Glucocerebrosidase
MEFSSPSREECPKPLSRVSIMAGSLTGLLLLQAVSWASGARPCIPKSFGYSSVVCVCNATYCDSFDPPTLPALGTFSRYESTRSGRRMELSMGPIQANHTGTGLLLTLQPEQKFQKVKGFGGAMTDAAALNILALSPPAQNLLLKSYFSEEGIGYNIIRVPMASCDFSIRTYTYADTPDDFQLHNFSLPEEDTKLKIPLIHRALQLSQRPVSLFASPWTSPTWLKTNGAVNGKGSLKGQPGDIYHQTWARYFVKFLDAYAEHKLQFWAVTAENEPSAGLLSGYPFQCLGFTPEHQRDFIARDLGPTLANSTHHNVRLLMLDDQRLLLPHWAKVVLTDPEAAKYVHGIAVHWYLDFLAPAKATLGETHRLFPNTMLFASEACVGSKFWEQSVRLGSWDRGMQYSHSIITNLLYHVVGWTDWNLALNPEGGPNWVRNFVDSPIIVDITKDTFYKQPMFYHLGHFSKFIPEGSQRVGLVASQKNDLDAVALLHPDGSAVVVVLNRSSKDVPFTIKDPAVGFLETISPGYSIHTYLWRRQ

SEQ ID NO: 299 - DNA, 1614 bp, synthetic construct
  misc_feature 1..1614: note = Variant of B-Glucocerebrosidase
  source 1..1614: mol_type = other DNA
atggagttttcttctcctagtagagaagaatgccccaagccactgagcagggtgagcatcatggctggatccctcacagggctgcttcttttgcaggcagtctcatgggcctctggagccaggccctgtattcccaagtcattcggctacagctcagtggtgtgtgtatgcaatgccacctattgtgacagtttcgatcctccaactctccctgctctgggtaccttctcccggtatgagagcacaagaagtggaagacgcatggagctctcaatgggccctatacaggctaaccacactgggacaggtctgctgctgaccatccaacctgaacagaagtttcagaaagtcaagggatttggaggagccatgactgatgcagcagcactcaacatcttggccctgtctccaccagcccagaatctgctgttgaagtcctacttctcagaggaggggattggctacaacatcatccgggttcccatggctagctgtgacttctccattaggacctatacatacgctgacacccccgatgattttcagctccataatttcagtctccctgaagaagacaccaaactgaagatacctctgattcacagagccttgcaactgtcccaaaggccagtgagcctcttcgcttctccctggactagtcctacatggctgaagactaatggtgctgttaatgggaaaggctccctgaaaggacagccaggtgacatatatcatcagacatgggcccgctactttgtgaaattccttgatgcctatgcagagcacaagctccaattctgggcagtcaccgcagaaaacgagccctcagctgggctgctgtctggctacccctttcagtgcttgggctttactcctgagcatcaacgggacttcattgcccgggatttggggccaacactggccaacagcacccaccacaatgtaagactcctcatgctggatgaccagaggctgctgctccctcattgggccaaggtggtgttgacagacccagaagctgccaaatatgttcatggcatcgctgtccactggtacctggattttttggcccctgcaaaggctactctgggagagacccacagactcttccccaataccatgctgtttgcatcagaagcctgcgtggggagcaaattctgggagcagtctgttaggctgggttcctgggatcggggcatgcaatattcccatagtataataactaacctcctctaccacgtggtaggatggacagactggaatctggctttgaacccagaaggaggccccaattgggtgcgcaactttgttgacagccccatcattgtggatatcacaaaggacaccttctacaaacagcctatgttctatcatctggggcactttagcaagttcattccagagggttcccagagagtaggcttggttgcctcacagaagaatgatctggatgctgtggcactcctgcatcctgacgggagtgcagtggtggtagtactgaacaggtctagcaaagatgttcccttgactatcaaagacccagctgtgggctttctggaaaccatttcccctggatactctatccacacctatctctggagaagacagtaatga

SEQ ID NO: 300 - protein, 536 aa, synthetic construct
  REGION 1..536: note = Variant of B-Glucocerebrosidase
MEFSSPSREECPKPLSRVSIMAGSLTGLLLLQAVSWASGARPCIPKSFGYSSVVCVCNATYCDSFDPPTLPALGTFSRYESTRSGRRMELSMGPIQANHTGTGLLLTIQPEQKFQKVKGFGGAMTDAAALNILALSPPAQNLLLKSYFSEEGIGYNIIRVPMASCDFSIRTYTYADTPDDFQLHNFSLPEEDTKLKIPLIHRALQLSQRPVSLFASPWTSPTWLKTNGAVNGKGSLKGQPGDIYHQTWARYFVKFLDAYAEHKLQFWAVTAENEPSAGLLSGYPFQCLGFTPEHQRDFIARDLGPTLANSTHHNVRLLMLDDQRLLLPHWAKVVLTDPEAAKYVHGIAVHWYLDFLAPAKATLGETHRLFPNTMLFASEACVGSKFWEQSVRLGSWDRGMQYSHSIITNLLYHVVGWTDWNLALNPEGGPNWVRNFVDSPIIVDITKDTFYKQPMFYHLGHFSKFIPEGSQRVGLVASQKNDLDAVALLHPDGSAVVVVLNRSSKDVPLTIKDPAVGFLETISPGYSIHTYLWRRQ

SEQ ID NO: 301 - DNA, 1614 bp, synthetic construct
  misc_feature 1..1614: note = Variant of B-Glucocerebrosidase
  source 1..1614: mol_type = other DNA
atggagttttcttctcctagtagagaagaatgccccaagccactgagcagggtgagcatcatggctggatccctcacagggctgcttcttttgcaggcagtctcatgggcctctggagccaggccctgtattcccaagtcattcggctactcctcagtggtgtgtgtatgcaatgccacctattgtgacagtttcgatcctccaactctccctgctctgggtaccttctcccggtatgagagcacaagaagtggaagacgcatggagctctcaatgggccctatacaggctaaccacactgggacaggtctgctgctgaccatccaacctgaacagaagtttcagaaaatcaagggatttggaggagccatgactgatgcagcagcactcaacatcttggccctgtctccaccagcccagaatctgctgttgaagtcctacttctcagaggaggggattggctacaacatcatccgggttcccatggctagctgtgacttctccattaggacctatacatacgctgacacccccgatgattttcagctccataatttcagtctccctgaagaagacaccaaactgaagatacctctgattcacagagccttgcaactgtcccaaaggccagtgagcctcttcgcttctccctggactagtcctacatggctgaagactaatggtgctgttaatgggaaaggctccctgaaaggacagccaggtgacatatatcatcagacatgggcccgctactttgtgaaattccttgatgcctatgcagagcacaagctccaattctgggcagtcaccgcagaaaacgagccctcagctgggctgctgtctggctacccctttcagtgcttgggctttactcctgagcatcaacgggacttcattgcccgggatttggggccaacactggccaacagcacccaccacaatgttagactcctcatgctggatgaccagaggctgctgctccctcattgggccaaggtggtgttgacagacccagaagctgccaaatatgttcatggcatcgctgtccactggtacctggattttttggcccctgcaaaggctactctgggagagacccacagactcttccccaataccatgctgtttgcatcagaagcctgcgtggggagcaaattctgggagcagtctgttaggctgggttcctgggatcggggcatgcaatattcccatagtataataactaacctcctctaccacgtggtaggatggacagactggaatctggctttgaacccagaaggaggccccaattgggtgcgcaactttgttgacagccccatcattgtggatatcacaaaggacaccttctacaaacagcctatgttctatcatctggggcactttagcaagttcattccagagggttcccagagagtaggcttggttgcctcacagaagaatgatctggatgctgtggcactcctgcatcctgacgggagtgcagtggtggtagtactgaacaggtctagcaaagatgttcccttcactatcaaagacccagctgtgggctttctcgaaaccatttcccctggatactctatccacacctatctctggagaagacagtaatga

SEQ ID NO: 302 - protein, 536 aa, synthetic construct
  REGION 1..536: note = Variant of B-Glucocerebrosidase
MEFSSPSREECPKPLSRVSIMAGSLTGLLLLQAVSWASGARPCIPKSFGYSSVVCVCNATYCDSFDPPTLPALGTFSRYESTRSGRRMELSMGPIQANHTGTGLLLTIQPEQKFQKIKGFGGAMTDAAALNILALSPPAQNLLLKSYFSEEGIGYNIIRVPMASCDFSIRTYTYADTPDDFQLHNFSLPEEDTKLKIPLIHRALQLSQRPVSLFASPWTSPTWLKTNGAVNGKGSLKGQPGDIYHQTWARYFVKFLDAYAEHKLQFWAVTAENEPSAGLLSGYPFQCLGFTPEHQRDFIARDLGPTLANSTHHNVRLLMLDDQRLLLPHWAKVVLTDPEAAKYVHGIAVHWYLDFLAPAKATLGETHRLFPNTMLFASEACVGSKFWEQSVRLGSWDRGMQYSHSIITNLLYHVVGWTDWNLALNPEGGPNWVRNFVDSPIIVDITKDTFYKQPMFYHLGHFSKFIPEGSQRVGLVASQKNDLDAVALLHPDGSAVVVVLNRSSKDVPFTIKDPAVGFLETISPGYSIHTYLWRRQ

SEQ ID NO: 303 - DNA, 1614 bp, synthetic construct
  misc_feature 1..1614: note = Variant of B-Glucocerebrosidase
  source 1..1614: mol_type = other DNA
atggagttttcttctcctagtagagaagaatgccccaagccactgagcagggtgagcatcatggctggatccctcacagggctgcttcttttgcaggcagtctcatgggcctctggagccaggccctgtattcccaagtcattcggctactcctcagtggtgtgtgtatgcaatgccacctattgtgacagtttcgatcctccaactctccctgctctgggtaccttctcccggtatgagagcacaagaagtggaagacgcatggagctctcaatgggccctatacaggctaaccacactgggacaggtctgctgctgaccctccaacctgaacagaagtttcagaaagtcaagggatttggaggagccatgactgatgcagcagcactcaacatcttggccctgtctccaccagcccagaatctgctgttgaagtcctacttctcagaggaggggattggctacaacatcatccgggttcccatggctagctgtgacttctccattaggacctatacatacgctgacacccccgatgattttcagctccataatttcagtctccctgaagaagacaccaaactgaagatacctctgattcacagagccttgcaactgtcccaaaggccagtgagcctcttcgcttctccctggactagtcctacatggctgaagactaatggtgctgttaatgggaaaggctccctgaaaggacagccaggtgacatatatcatcagacatgggcccgctactttgtgaaattccttgatgcctatgcagagcacaagctccaattctgggcagtcaccgcagaaaacgagccctcagctgggctgctgtctggctacccctttcagtgcttgggctttactcctgagcatcaacgggacttcattgcccgggatttggggccaacactggccaacagcacccaccacaatgtaagactcctcatgctggatgaccagaggctgctgctccctcattgggccaaggtggtgttgacagacccagaagctgccaaatatgttcatggcatcgctgtccactggtacctggattttttggcccctgcaaaggctactctgggagagacccacagactcttccccaataccatgctgtttgcatcagaagcctgcgtggggagcaaattctgggagcagtctgttaggctgggttcctgggatcggggcatgcaatattcccatagtataataactaacctcctctaccacgtggtaggatggacagactggaatctggctttgaacccagaaggaggccccaattgggtgcgcaactttgttgacagccccatcattgtggatatcacaaaggacaccttctacaaacagcctatgttctatcatctggggcactttagcaagttcattccagagggttcccagagagtaggcttggttgcctcacagaagaatgatctggatgctgtggcactcctgcatcctgacgggagtgcagtggtggtagtactgaacaggtctagcaaagatgttcccctcactatcaaagacccagctgtgggctttatcgaaaccatttcccctggatactctatccacacctatctctggagaagacagtaatga

SEQ ID NO: 304 - protein, 536 aa, synthetic construct
  REGION 1..536: note = Variant of B-Glucocerebrosidase
MEFSSPSREECPKPLSRVSIMAGSLTGLLLLQAVSWASGARPCIPKSFGYSSVVCVCNATYCDSFDPPTLPALGTFSRYESTRSGRRMELSMGPIQANHTGTGLLLTLQPEQKFQKVKGFGGAMTDAAALNILALSPPAQNLLLKSYFSEEGIGYNIIRVPMASCDFSIRTYTYADTPDDFQLHNFSLPEEDTKLKIPLIHRALQLSQRPVSLFASPWTSPTWLKTNGAVNGKGSLKGQPGDIYHQTWARYFVKFLDAYAEHKLQFWAVTAENEPSAGLLSGYPFQCLGFTPEHQRDFIARDLGPTLANSTHHNVRLLMLDDQRLLLPHWAKVVLTDPEAAKYVHGIAVHWYLDFLAPAKATLGETHRLFPNTMLFASEACVGSKFWEQSVRLGSWDRGMQYSHSIITNLLYHVVGWTDWNLALNPEGGPNWVRNFVDSPIIVDITKDTFYKQPMFYHLGHFSKFIPEGSQRVGLVASQKNDLDAVALLHPDGSAVVVVLNRSSKDVPLTIKDPAVGFIETISPGYSIHTYLWRRQ

SEQ ID NO: 305 - DNA, 1614 bp, synthetic construct
  misc_feature 1..1614: note = Variant of B-Glucocerebrosidase
  source 1..1614: mol_type = other DNA
atggagttttcttctcctagtagagaagaatgccccaagccactgagcagggtgagcatcatggctggatccctcacagggctgcttcttttgcaggcagtctcatgggcctctggagccaggccctgtattcccaagtcattcggctacagctcagtggtgtgtgtatgcaatgccacctattgtgacagtttcgatcctccaactctccctgctctgggtaccttctcccggtatgagagcacaagaagtggaagacgcatggagctctcaatgggccctatacaggctaaccacactgggacaggtctgctgctgaccatccaacctgaacagaagtttcagaaagtcaagggatttggaggagccatgactgatgcagcagcactcaacatcttggccctgtctccaccagcccagaatctgctgttgaagtcctacttctcagaggaggggattggctacaacatcatccgggttcccatggctagctgtgacttctccattaggacctatacatacgctgacacccccgatgattttcagctccataatttcagtctccctgaagaagacaccaaactgaagatacctctgattcacagagccttgcaactgtcccaaaggccagtgagcctcttcgcttctccctggactagtcctacatggctgaagactaatggtgctgttaatgggaaaggctccctgaaaggacagccaggtgacatatatcatcagacatgggcccgctactttgtgaaattccttgatgcctatgcagagcacaagctccaattctgggcagtcaccgcagaaaacgagccctcagctgggctgctgtctggctacccctttcagtgcttgggctttactcctgagcatcaacgggacttcattgcccgggatttggggccaacactggccaacagcacccaccacaatgtaagactcctcatgctggatgaccagaggctgctgctccctcattgggccaaggtggtgttgacagacccagaagctgccaaatatgttcatggcatcgctgtccactggtacctggattttttggcccctgcaaaggctactctgggagagacccacagactcttccccaataccatgctgtttgcatcagaagcctgcgtggggagcaaattctgggagcagtctgttaggctgggttcctgggatcggggcatgcaatattcccatagtataataactaacctcctctaccacgtggtaggatggacagactggaatctggctttgaacccagaaggaggccccaattgggtgcgcaactttgttgacagccccatcattgtggatatcacaaaggacaccttctacaaacagcctatgttctatcatctggggcactttagcaagttcattccagagggttcccagagagtaggcttggttgcctcacagaagaatgatctggatgctgtggcactcctgcatcctgacgggagtgcagtggtggtagtactgaacaggtctagcaaagatgttcccttgactatcaaagacccagctgtgggctttatcgaaaccatttcccctggatactctatccacacctatctctggagaagacagtaatga

SEQ ID NO: 306 - protein, 536 aa, synthetic construct
  REGION 1..536: note = Variant of B-Glucocerebrosidase
MEFSSPSREECPKPLSRVSIMAGSLTGLLLLQAVSWASGARPCIPKSFGYSSVVCVCNATYCDSFDPPTLPALGTFSRYESTRSGRRMELSMGPIQANHTGTGLLLTIQPEQKFQKVKGFGGAMTDAAALNILALSPPAQNLLLKSYFSEEGIGYNIIRVPMASCDFSIRTYTYADTPDDFQLHNFSLPEEDTKLKIPLIHRALQLSQRPVSLFASPWTSPTWLKTNGAVNGKGSLKGQPGDIYHQTWARYFVKFLDAYAEHKLQFWAVTAENEPSAGLLSGYPFQCLGFTPEHQRDFIARDLGPTLANSTHHNVRLLMLDDQRLLLPHWAKVVLTDPEAAKYVHGIAVHWYLDFLAPAKATLGETHRLFPNTMLFASEACVGSKFWEQSVRLGSWDRGMQYSHSIITNLLYHVVGWTDWNLALNPEGGPNWVRNFVDSPIIVDITKDTFYKQPMFYHLGHFSKFIPEGSQRVGLVASQKNDLDAVALLHPDGSAVVVVLNRSSKDVPLTIKDPAVGFIETISPGYSIHTYLWRRQ

SEQ ID NO: 307 - DNA, 1614 bp, synthetic construct
  misc_feature 1..1614: note = Variant of B-Glucocerebrosidase
  source 1..1614: mol_type = other DNA
atggagttttcttctcctagtagagaagaatgccccaagccactgagcagggtgagcatcatggctggatccctcacagggctgcttcttttgcaggcagtctcatgggcctctggagccaggccctgtattcccaagtcattcggctacagctcagtggtgtgtgtatgcaatgccacctattgtgacagtttcgatcctccaactctccctgctctgggtaccttctcccggtatgagagcacaagaagtggaagacgcctggagctctcaatgggccctatacaggctaaccacactgggacaggtctgctgctgaccctccaacctgaacagaagtttcagaaagtcaagggatttggaggagccatgactgatgcagcagcactcaacatcttggccctgtctccaccagcccagaatctgctgttgaagtcctacttctcagaggaggggattggctacaacattatccgggttcccatggctagctgtgacttctccattaggacctatacatacgctgacacccccgatgattttcagctccataatttcagtctccctgaagaagacaccaaactgaagatacctctgattcacagagccttgcaactgtcccaaaggccagtgagcctcttcgcttctccctggactagtcctacatggctgaagactaatggtgctgttaatgggaaaggctccctgaaaggacagccaggtgacatatatcatcagacatgggcccgctactttgtgaaattccttgatgcatatgcagagcacaagctccaattctgggcagtcaccgcagaaaacgagccctcagctgggctgctgtctggctacccctttcagtgcttgggctttactcctgagcatcaacgggacttcattgcccgggatttggggccaacactggccaacagcacccaccacaatgttagactcctcatgctggatgaccagaggctgctgctccctcattgggccaaggtggtgttgacagacccagaagctgccaaatatgttcatggcatcgctgtccactggtacctggattttttggcccctgcaaaggctactctgggagagacccacagactcttccccaataccatgctgtttgcatcagaagcctgcgtggggagcaaattctgggagcagtctgttaggctgggttcctgggatcggggcatgcaatattcccatagtataataactaacctcctctaccacgtggtaggatggacagactggaatctggctttgaacccagaaggaggccccaattgggtgcgcaactttgttgacagccccatcattgtggatatcacaaaggacaccttctacaaacagcctatgttctatcatctggggcactttagcaagttcattccagagggttcccagagagtaggcttggttgcctcacagaagaatgatctggatgctgtggcactcctgcatcctgacgggagtgcagtggtggtagtactgaacaggtctagcaaagatgttcccctcactatcaaagacccagctgtgggctttctcgaaaccatttcccctggatactctatccacacctatctctggagaagacagtaatga

SEQ ID NO: 308 - protein, 536 aa, synthetic construct
  REGION 1..536: note = Variant of B-Glucocerebrosidase
MEFSSPSREECPKPLSRVSIMAGSLTGLLLLQAVSWASGARPCIPKSFGYSSVVCVCNATYCDSFDPPTLPALGTFSRYESTRSGRRLELSMGPIQANHTGTGLLLTLQPEQKFQKVKGFGGAMTDAAALNILALSPPAQNLLLKSYFSEEGIGYNIIRVPMASCDFSIRTYTYADTPDDFQLHNFSLPEEDTKLKIPLIHRALQLSQRPVSLFASPWTSPTWLKTNGAVNGKGSLKGQPGDIYHQTWARYFVKFLDAYAEHKLQFWAVTAENEPSAGLLSGYPFQCLGFTPEHQRDFIARDLGPTLANSTHHNVRLLMLDDQRLLLPHWAKVVLTDPEAAKYVHGIAVHWYLDFLAPAKATLGETHRLFPNTMLFASEACVGSKFWEQSVRLGSWDRGMQYSHSIITNLLYHVVGWTDWNLALNPEGGPNWVRNFVDSPIIVDITKDTFYKQPMFYHLGHFSKFIPEGSQRVGLVASQKNDLDAVALLHPDGSAVVVVLNRSSKDVPLTIKDPAVGFLETISPGYSIHTYLWRRQ

SEQ ID NO: 309 - DNA, 1614 bp, synthetic construct
  misc_feature 1..1614: note = Variant of B-Glucocerebrosidase
  source 1..1614: mol_type = other DNA
atggagttttcttctcctagtagagaagaatgccccaagccactgagcagggtgagcatcatggctggatccctcacagggctgcttcttttgcaggcagtctcatgggcctctggagccaggccctgtattcccaagtcattcggctacagctcagtggtgtgtgtatgcaatgccacctattgtgacagtttcgatcctccaactctccctgctctgggtaccttctcccggtatgagagcacaagaagtggaagacgcatggagctctcaatgggccctatacaggctaaccacactgggacaggtctgctgctgaccctccaacctgaacagaagtttcagaaaatcaagggatttggaggagccatgactgatgcagcagcactcaacatcttggccctgtctccaccagcccagaatctgctgttgaagtcctacttctcagaggaggggattggctacaacatcatccgggttcccatggctagctgtgacttctccattaggacctatacatacgctgacacccccgatgattttcagctccataatttcagtctccctgaagaagacaccaaactgaagatacctctgattcacagagccttgcaactgtcccaaaggccagtgagcctcttcgcttctccctggactagtcctacatggctgaagactaatggtgctgttaatgggaaaggctccctgaaaggacagccaggtgacatatatcatcagacatgggcccgctactttgtgaaattccttgatgcctatgcagagcacaagctccaattctgggcagtcaccgcagaaaacgagccctcagctgggctgctgtctggctacccctttcagtgcttgggctttactcctgagcatcaacgggacttcattgcccgggatttggggccaacactggccaacagcacccaccacaatgttagactcctcatgctggatgaccagaggctgctgctccctcattgggccaaggtggtgttgacagacccagaagctgccaaatatgttcatggcatcgctgtccactggtacctggattttttggcccctgcaaaggctactctgggagagacccacagactcttccccaataccatgctgtttgcatcagaagcctgcgtggggagcaaattctgggagcagtctgttaggctgggttcctgggatcggggcatgcaatattcccatagtataataactaacctcctctactacgtggtaggatggacagactggaatctggctttgaacccagaaggaggccccaattgggtgcgcaactttgttgacagccccatcattgtggatatcacaaaggacaccttctacaaacagcctatgttctatcatctggggcactttagcaagttcattccagagggttcccagagagtaggcttggttgcctcacagaagaatgatctggatgctgtggcactcctgcatcctgacgggagtgcagtggtggtagtactgaacaggtctagcaaagatgttcccttcactatcaaagacccagctgtgggctttctcgaaaccatttcccctggatactctatccacacctatctctggagaagacagtaatga

SEQ ID NO: 310 - protein, 536 aa, synthetic construct
  REGION 1..536: note = Variant of B-Glucocerebrosidase
MEFSSPSREECPKPLSRVSIMAGSLTGLLLLQAVSWASGARPCIPKSFGYSSVVCVCNATYCDSFDPPTLPALGTFSRYESTRSGRRMELSMGPIQANHTGTGLLLTLQPEQKFQKIKGFGGAMTDAAALNILALSPPAQNLLLKSYFSEEGIGYNIIRVPMASCDFSIRTYTYADTPDDFQLHNFSLPEEDTKLKIPLIHRALQLSQRPVSLFASPWTSPTWLKTNGAVNGKGSLKGQPGDIYHQTWARYFVKFLDAYAEHKLQFWAVTAENEPSAGLLSGYPFQCLGFTPEHQRDFIARDLGPTLANSTHHNVRLLMLDDQRLLLPHWAKVVLTDPEAAKYVHGIAVHWYLDFLAPAKATLGETHRLFPNTMLFASEACVGSKFWEQSVRLGSWDRGMQYSHSIITNLLYYVVGWTDWNLALNPEGGPNWVRNFVDSPIIVDITKDTFYKQPMFYHLGHFSKFIPEGSQRVGLVASQKNDLDAVALLHPDGSAVVVVLNRSSKDVPFTIKDPAVGFLETISPGYSIHTYLWRRQ

SEQ ID NO: 311 - DNA, 1614 bp, synthetic construct
  misc_feature 1..1614: note = Variant of B-Glucocerebrosidase
  source 1..1614: mol_type = other DNA
atggagttttcttctcctagtagagaagaatgccccaagccactgagcagggtgagcatcatggctggatccctcacagggctgcttcttttgcaggcagtctcatgggcctctggagccaggccctgtattcccaagtcattcggctactcctcagtggtgtgtgtatgcaatgccacctattgtgacagtttcgatcctccaactctccctgctctgggtaccttctcccggtatgagagcacaagaagtggaagacgcatggagctctcaatgggccctatacaggctaaccacactgggacaggtctgctgctgaccctccaacctgaacagaagtttcagaaagtcaagggatttggaggagccatgactgatgcagcagcactcaacatcttggccctgtctccaccagcccagaatctgctgttgaagtcctacttctcagaggaggggattggctacaacatcatccgggttcccatggctagctgtgacttctccattaggacctatacatacgctgacacccccgatgattttcagctccataatttcagtctccctgaagaagacaccaaactgaagatacctctgattcacagagccttgcaactgtcccaaaggccagtgagcctcttcgcttctccctggactagtcctacatggctgaagactaatggtgctgttaatgggaaaggctccctgaaaggacagccaggtgacatatatcatcagacatgggcccgctactttgtgaaattccttgatgcctatgcagagcacaagctccaattctgggcagtcaccgcagaaaacgagccctcagctgggctgctgtctggctacccctttcagtgcttgggctttactcctgagcatcaacgggacttcattgcccgggatttggggccaacactggccaacagcacccaccacaatgtaagactcctcatgctggatgaccagaggctgctgctccctcattgggccaaggtggtgttgacagacccagaagctgccaaatatgttcatggcatcgctgtccactggtacctggattttttggcccctgcaaaggctactctgggagagacccacagactcttccccaataccatgctgtttgcatcagaagcctgcgtggggagcaaattctgggagcagtctgttaggctgggttcctgggatcggggcatgcaatattcccatagtataataactaacctcctctaccacgtggtaggatggacagactggaatctggctttgaacccagaaggaggccccaattgggtgcgcaactttgttgacagccccatcattgtggatatcacaaaggacaccttctacaaacagcctatgttctatcatctggggcactttagcaagttcattccagagggttcccagagagtaggcttggttgcctcacagaagaatgatctggatgctgtggcactcctgcatcctgacgggagtgcagtggtggtagtactgaacaggtctagcaaagatgttcccttcactatcaaagacccagctgtgggctttatcgaaaccatttcccctggatactctatccacacctatctctggagaagacagtaatga

SEQ ID NO: 312 - protein, 536 aa, synthetic construct
  REGION 1..536: note = Variant of B-Glucocerebrosidase
MEFSSPSREECPKPLSRVSIMAGSLTGLLLLQAVSWASGARPCIPKSFGYSSVVCVCNATYCDSFDPPTLPALGTFSRYESTRSGRRMELSMGPIQANHTGTGLLLTLQPEQKFQKVKGFGGAMTDAAALNILALSPPAQNLLLKSYFSEEGIGYNIIRVPMASCDFSIRTYTYADTPDDFQLHNFSLPEEDTKLKIPLIHRALQLSQRPVSLFASPWTSPTWLKTNGAVNGKGSLKGQPGDIYHQTWARYFVKFLDAYAEHKLQFWAVTAENEPSAGLLSGYPFQCLGFTPEHQRDFIARDLGPTLANSTHHNVRLLMLDDQRLLLPHWAKVVLTDPEAAKYVHGIAVHWYLDFLAPAKATLGETHRLFPNTMLFASEACVGSKFWEQSVRLGSWDRGMQYSHSIITNLLYHVVGWTDWNLALNPEGGPNWVRNFVDSPIIVDITKDTFYKQPMFYHLGHFSKFIPEGSQRVGLVASQKNDLDAVALLHPDGSAVVVVLNRSSKDVPFTIKDPAVGFIETISPGYSIHTYLWRRQ

SEQ ID NO: 313 - DNA, 1614 bp, synthetic construct
  misc_feature 1..1614: note = Variant of B-Glucocerebrosidase
  source 1..1614: mol_type = other DNA
atggagttttcttctcctagtagagaagaatgccccaagccactgagcagggtgagcatcatggctggatccctcacagggctgcttcttttgcaggcagtctcatgggcctctggagccaggccctgtattcccaagtcattcggctactcctcagtggtgtgtgtatgcaatgccacctattgtgacagtttcgatcctccaactctccctgctctgggtaccttctcccggtatgagagcacaagaagtggaagacgcatggagctctcaatgggccctatacaggctaaccacactgggacaggtctgctgctgaccctccaacctgaacagaagtttcagaaagtcaagggatttggaggagccatgactgatgcagcagcactcaacatcttggccctgtctccaccagcccagaatctgctgttgaagtcctacttctcagaggaggggattggctacaacatcatccgggttcccatggctagctgtgacttctccattaggacctatacatacgctgacacccccgatgattttcagctccataatttcagtctccctgaagaagacaccaaactgaagatacctctgattcacagagccttgcaactgtcccaaaggccagtgagcctcttcgcttctccctggactagtcctacatggctgaagactaatggtgctgttaatgggaaaggctccctgaaaggacagccaggtgacatatatcatcagacatgggcccgctactttgtgaaattccttgatgcctatgcagagcacaagctccaattctgggcagtcaccgcagaaaacgagccctcagctgggctgctgtctggctacccctttcagtgcttgggctttactcctgagcatcaacgggacttcattgcccgggatttggggccaacactggccaacagcacccaccacaatgtaagactcctcatgctggatgaccagaggctgctgctccctcattgggccaaggtggtgttgacagacccagaagctgccaaatatgttcatggcatcgctgtccactggtacctggattttttggcccctgcaaaggctactctgggagagacccacagactcttccccaataccatgctgtttgcatcagaagcctgcgtggggagcaaattctgggagcagtctgttaggctgggttcctgggatcggggcatgcaatattcccatagtataataactaacctcctctactacgtggtaggatggacagactggaatctggctttgaacccagaaggaggccccaattgggtgcgcaactttgttgacagccccatcattgtggatatcacaaaggacaccttctacaaacagcctatgttctatcatctggggcactttagcaagttcattccagagggttcccagagagtaggcttggttgcctcacagaagaatgatctggatgctgtggcactcctgcatcctgacgggagtgcagtggtggtagtactgaacaggtctagcaaagatgttcccttgactatcaaagacccagctgtgggctttctggaaaccatttcccctggatactctatccatacctatctctggagaagacagtaatga

SEQ ID NO: 314 - protein, 536 aa, synthetic construct
  REGION 1..536: note = Variant of B-Glucocerebrosidase
MEFSSPSREECPKPLSRVSIMAGSLTGLLLLQAVSWASGARPCIPKSFGYSSVVCVCNATYCDSFDPPTLPALGTFSRYESTRSGRRMELSMGPIQANHTGTGLLLTLQPEQKFQKVKGFGGAMTDAAALNILALSPPAQNLLLKSYFSEEGIGYNIIRVPMASCDFSIRTYTYADTPDDFQLHNFSLPEEDTKLKIPLIHRALQLSQRPVSLFASPWTSPTWLKTNGAVNGKGSLKGQPGDIYHQTWARYFVKFLDAYAEHKLQFWAVTAENEPSAGLLSGYPFQCLGFTPEHQRDFIARDLGPTLANSTHHNVRLLMLDDQRLLLPHWAKVVLTDPEAAKYVHGIAVHWYLDFLAPAKATLGETHRLFPNTMLFASEACVGSKFWEQSVRLGSWDRGMQYSHSIITNLLYYVVGWTDWNLALNPEGGPNWVRNFVDSPIIVDITKDTFYKQPMFYHLGHFSKFIPEGSQRVGLVASQKNDLDAVALLHPDGSAVVVVLNRSSKDVPLTIKDPAVGFLETISPGYSIHTYLWRRQ

SEQ ID NO: 315 - DNA, 1614 bp, synthetic construct
  misc_feature 1..1614: note = Variant of B-Glucocerebrosidase
  source 1..1614: mol_type = other DNA
atggagttttcttctcctagtagagaagaatgccccaagccactgagcagggtgagcatcatggctggatccctcacagggctgcttcttttgcaggcagtctcatgggcctctggagccaggccctgtattcccaagtcattcggctacagctcagtggtgtgtgtatgcaatgccacctattgtgacagtttcgatcctccaactctccctgctctgggtaccttctcccggtatgagagcacaagaagtggaagacgcatggagctctcaatgggccctatacaggctaaccacactgggacaggtctgctgctgaccatccaacctgaacagaagtttcagaaaatcaagggatttggaggagccatgactgatgcagcagcactcaacatcttggccctgtctccaccagcccagaatctgctgttgaagtcctacttctcagaggaggggattggctacaacatcatccgggttcccatggctagctgtgacttctccattaggacctatacatacgctgacacccccgatgattttcagctccataatttcagtctccctgaagaagacaccaaactgaagatacctctgattcacagagccttgcaactgtcccaaaggccagtgagcctcttcgcttctccctggactagtcctacatggctgaagactaatggtgctgttaatgggaaaggctccctgaaaggacagccaggtgacatatatcatcagacatgggcccgctactttgtgaaattccttgatgcctatgcagagcacaagctccaattctgggcagtcaccgcagaaaacgagccctcagctgggctgctgtctggctacccctttcagtgcttgggctttactcctgagcatcaacgggacttcattgcccgggatttggggccaacactggccaacagcacccaccacaataccagactcctcatgctggatgaccagaggctgctgctccctcattgggccaaggtggtgttgacagacccagaagctgccaaatatgttcatggcatcgctgtccactggtacctggattttttggcccctgcaaaggctactctgggagagacccacagactcttccccaataccatgctgtttgcatcagaagcctgcgtggggagcaaattctgggagcagtctgttaggctgggttcctgggatcggggcatgcaatattcccatagtataataactaacctcctctaccacgtggtaggatggacagactggaatctggctttgaacccagaaggaggccccaattgggtgcgcaactttgttgacagccccatcattgtggatatcacaaaggacaccttctacaaacagcctatgttctatcatctggggcactttagcaagttcattccagagggttcccagagagtaggcttggttgcctcacagaagaatgatctggatgctgtggcactcctgcatcctgacgggagtgcagtggtggtagtactgaacaggtctagcaaagatgttcccctcactatcaaagacccagctgtgggctttctcgaaaccatttcccctggatactctatccacacctatctctggagaagacagtaatga

SEQ ID NO: 316 - protein, 536 aa, synthetic construct
  REGION 1..536: note = Variant of B-Glucocerebrosidase
MEFSSPSREECPKPLSRVSIMAGSLTGLLLLQAVSWASGARPCIPKSFGYSSVVCVCNATYCDSFDPPTLPALGTFSRYESTRSGRRMELSMGPIQANHTGTGLLLTIQPEQKFQKIKGFGGAMTDAAALNILALSPPAQNLLLKSYFSEEGIGYNIIRVPMASCDFSIRTYTYADTPDDFQLHNFSLPEEDTKLKIPLIHRALQLSQRPVSLFASPWTSPTWLKTNGAVNGKGSLKGQPGDIYHQTWARYFVKFLDAYAEHKLQFWAVTAENEPSAGLLSGYPFQCLGFTPEHQRDFIARDLGPTLANSTHHNTRLLMLDDQRLLLPHWAKVVLTDPEAAKYVHGIAVHWYLDFLAPAKATLGETHRLFPNTMLFASEACVGSKFWEQSVRLGSWDRGMQYSHSIITNLLYHVVGWTDWNLALNPEGGPNWVRNFVDSPIIVDITKDTFYKQPMFYHLGHFSKFIPEGSQRVGLVASQKNDLDAVALLHPDGSAVVVVLNRSSKDVPLTIKDPAVGFLETISPGYSIHTYLWRRQ

SEQ ID NO: 317 - DNA, 1614 bp, synthetic construct
  misc_feature 1..1614: note = Variant of B-Glucocerebrosidase
  source 1..1614: mol_type = other DNA
atggagttttcttctcctagtagagaagaatgccccaagccactgagcagggtgagcatcatggctggatccctcacagggctgcttcttttgcaggcagtctcatgggcctctggagccaggccctgtattcccaagtcattcggctactcctcagtggtgtgtgtatgcaatgccacctattgtgacagtttcgatcctccaactctccctgctctgggtaccttctcccggtatgagagcacaagaagtggaagacgcatggagctctcaatgggccctatacaggctaaccacactgggacaggtctgctgctgaccctccaacctgaacagaagtttcagaaaatcaagggatttggaggagccatgactgatgcagcagcactcaacatcttggccctgtctccaccagcccagaatctgctgttgaagtcctacttctcagaggaggggattggctacaacatcatccgggttcccatggctagctgtgacttctccattaggacctatacatacgctgacacccccgatgattttcagctccataatttcagtctccctgaagaagacaccaaactgaagatacctctgattcacagagccttgcaactgtcccaaaggccagtgagcctcttcgcttctccctggactagtcctacatggctgaagactaatggtgctgttaatgggaaaggctccctgaaaggacagccaggtgacatatatcatcagacatgggcccgctactttgtgaaattccttgatgcatatgcagagcacaagctccaattctgggcagtcaccacagaaaacgagccctcagctgggctgctgtctggctacccctttcagtgcttgggctttactcctgagcatcaacgggacttcattgcccgggatttggggccaacactggccaacagcacccaccacaatgttagactcctcatgctggatgaccagaggctgctgctccctcattgggccaaggtggtgttgacagacccagaagctgccaaatatgttcatggcatcgctgtccactggtacctggattttttggcccctgcaaaggctactctgggagagacccacagactcttccccaataccatgctgtttgcatcagaagcctgcgtggggagcaaattctgggagcagtctgttaggctgggttcctgggatcggggcatgcaatattcccatagtataataactaacctcctctaccacgtggtaggatggacagactggaatctggctttgaacccagaaggaggccccaattgggtgcgcaactttgttgacagccccatcattgtggatatcacaaaggacaccttctacaaacagcctatgttctatcatctggggcactttagcaagttcattccagagggttcccagagagtaggcttggttgcctcacagaagaatgatctggatgctgtggcactcctgcatcctgacgggagtgcagtggtggtagtactgaacaggtctagcaaagatgttcccttgactatcaaagacccagctgtgggctttctggaaaccatttcccctggatactctatccacacctatctctggagaagacagtaatga

SEQ ID NO: 318 - protein, 536 aa, synthetic construct
  REGION 1..536: note = Variant of B-Glucocerebrosidase
MEFSSPSREECPKPLSRVSIMAGSLTGLLLLQAVSWASGARPCIPKSFGYSSVVCVCNATYCDSFDPPTLPALGTFSRYESTRSGRRMELSMGPIQANHTGTGLLLTLQPEQKFQKIKGFGGAMTDAAALNILALSPPAQNLLLKSYFSEEGIGYNIIRVPMASCDFSIRTYTYADTPDDFQLHNFSLPEEDTKLKIPLIHRALQLSQRPVSLFASPWTSPTWLKTNGAVNGKGSLKGQPGDIYHQTWARYFVKFLDAYAEHKLQFWAVTTENEPSAGLLSGYPFQCLGFTPEHQRDFIARDLGPTLANSTHHNVRLLMLDDQRLLLPHWAKVVLTDPEAAKYVHGIAVHWYLDFLAPAKATLGETHRLFPNTMLFASEACVGSKFWEQSVRLGSWDRGMQYSHSIITNLLYHVVGWTDWNLALNPEGGPNWVRNFVDSPIIVDITKDTFYKQPMFYHLGHFSKFIPEGSQRVGLVASQKNDLDAVALLHPDGSAVVVVLNRSSKDVPLTIKDPAVGFLETISPGYSIHTYLWRRQ

SEQ ID NO: 319 - DNA, 1614 bp, synthetic construct
  misc_feature 1..1614: note = Variant of B-Glucocerebrosidase
  source 1..1614: mol_type = other DNA
atggagttttcttctcctagtagagaagaatgccccaagccactgagcagggtgagcatcatggctggatccctcacagggctgcttcttttgcaggcagtctcatgggcctctggagccaggccctgtattcccaagtcattcggctactcctcagtggtgtgtgtatgcaatgccacctattgtgacagtttcgatcctccaactctccctgctctgggtaccttctcccggtatgagagcacaagaagtggaagacgcatggagctctcaatgggccctatacaggctaaccacactgggacaggtctgctgctgaccctccaacctgaacagaagtttcagaaaatcaagggatttggaggagccatgactgatgcagcagcactcaacatcttggccctgtctccaccagcccagaatctgctgttgaagtcctacttctcagaggaggggattggctacaacatcatccgggttcccatggctagctgtgacttctccattaggacctatacatacgctgacacccccgatgattttcagctccataatttcagtctccctgaagaagacaccaaactgaagatacctctgattcacagagccttgcaactgtcccaaaggccagtgagcctcttcgcttctccctggactagtcctacatggctgaagactaatggtgctgttaatgggaaaggctccctgaaaggacagccaggtgacatatatcatcagacatgggcccgctactttgtgaaattccttgatgcctatgcagagcacaagctccaattctgggcagtcaccgcagaaaacgagccctcagctgggctgctgtctggctacccctttcagtgcttgggctttactcctgagcatcaacgggacttcattgcccgggatttggggccaacactggccaacagcacccaccacaatgtaagactcctcatgctggatgaccagaggctgctgctccctcattgggccaaggtggtgttgacagacccagaagctgccaaatatgttcatggcatcgctgtccactggtacctggattttttggcccctgcaaaggctactctgggagagacccacagactcttccccaataccatgctgtttgcatcagaagcctgcgtggggagcaaattctgggagcagtctgttaggctgggttcctgggatcggggcatgcaatattcccatagtataataactaacctcctctactacgtggtaggatggacagactggaatctggctttgaacccagaaggaggccccaattgggtgcgcaactttgttgacagccccatcattgtggatatcacaaaggacaccttctacaaacagcctatgttctatcatctggggcactttagcaagttcattccagagggttcccagagagtaggcttggttgcctcacagaagaatgatctggatgctgtggcactcctgcatcctgacgggagtgcagtggtggtagtactgaacaggtctagcaaagatgttcccttcactatcaaagacccagctgtgggctttctggaaaccatttcccctggatactctatccagacctatctctggagaagacagtaatga

SEQ ID NO: 320 - protein, 536 aa, synthetic construct
  REGION 1..536: note = Variant of B-Glucocerebrosidase
MEFSSPSREECPKPLSRVSIMAGSLTGLLLLQAVSWASGARPCIPKSFGYSSVVCVCNATYCDSFDPPTLPALGTFSRYESTRSGRRMELSMGPIQANHTGTGLLLTLQPEQKFQKIKGFGGAMTDAAALNILALSPPAQNLLLKSYFSEEGIGYNIIRVPMASCDFSIRTYTYADTPDDFQLHNFSLPEEDTKLKIPLIHRALQLSQRPVSLFASPWTSPTWLKTNGAVNGKGSLKGQPGDIYHQTWARYFVKFLDAYAEHKLQFWAVTAENEPSAGLLSGYPFQCLGFTPEHQRDFIARDLGPTLANSTHHNVRLLMLDDQRLLLPHWAKVVLTDPEAAKYVHGIAVHWYLDFLAPAKATLGETHRLFPNTMLFASEACVGSKFWEQSVRLGSWDRGMQYSHSIITNLLYYVVGWTDWNLALNPEGGPNWVRNFVDSPIIVDITKDTFYKQPMFYHLGHFSKFIPEGSQRVGLVASQKNDLDAVALLHPDGSAVVVVLNRSSKDVPFTIKDPAVGFLETISPGYSIQTYLWRRQ

SEQ ID NO: 321 - DNA, 1614 bp, synthetic construct
  misc_feature 1..1614: note = Variant of B-Glucocerebrosidase
  source 1..1614: mol_type = other DNA
atggagttttcttctcctagtagagaagaatgccccaagccactgagcagggtgagcatcatggctggatccctcacagggctgcttcttttgcaggcagtctcatgggcctctggagccaggccctgtattcccaagtcattcggctactcctcagtggtgtgtgtatgcaatgccacctattgtgacagtttcgatcctccaactctccctgctctgggtaccttctcccggtatgagagcacaagaagtggaagacgcatggagctctcaatgggccctatacaggctaaccacactgggacaggtctgctgctgaccctccaacctgaacagaagtttcagaaagtcaagggatttggaggagccatgactgatgcagcagcactcaacatcttggccctgtctccaccagcccagaatctgctgttgaagtcctacttctcagaggaggggattggctacaacatcatccgggttcccatggctagctgtgacttctccattaggacctatacatacgctgacacccccgatgattttcagctccataatttcagtctccctgaagaagacaccaaactgaagatacctctgattcacagagccttgcaactgtcccaaaggccagtgagcctcttcgcttctccctggactagtcctacatggctgaagactaatggtgctgttaatgggaaaggctccctgaaaggacagccaggtgacatatatcatcagacatgggcccgctactttgtgaaattccttgatgcctatgcagagcacaagctccaattctgggcagtcaccgcagaaaacgagccctcagctgggctgctgtctggctacccctttcagtgcttgggctttactcctgagcatcaacgggacttcattgcccgggatttggggccaacactggccaacagcacccaccacaatgtaagactcctcatgctggatgaccagaggctgctgctccctcattgggccaaggtggtgttgacagacccagaagctgccaaatatgttcatggcatcgctgtccactggtacctggattttttggcccctgcaaaggctactctgggagagacccacagactcttccccaataccatgctgtttgcatcagaagcctgcgtggggagcaaattctgggagcagtctgttaggctgggttcctgggatcggggcatgcaatattcccatagtataataactaacctcctctactacgtggtaggatggacagactggaatctggctttgaacccagaaggaggccccaattgggtgcgcaactttgttgacagccccatcattgtggatatcacaaaggacaccttctacaaacagcctatgttctatcatctggggcactttagcaagttcattccagagggttcccagagagtaggcttggttgcctcacagaagaatgatctggatgctgtggcactcctgcatcctgacgggagtgcagtggtggtagtactgaacaggtctagcaaagatgttcccttcactatcaaagacccagctgtgggctttctcgaaaccatttcccctggatactctatccacacctatctctggagaagacagtaatga

SEQ ID NO: 322 - protein, 536 aa, synthetic construct
  REGION 1..536: note = Variant of B-Glucocerebrosidase
MEFSSPSREECPKPLSRVSIMAGSLTGLLLLQAVSWASGARPCIPKSFGYSSVVCVCNATYCDSFDPPTLPALGTFSRYESTRSGRRMELSMGPIQANHTGTGLLLTLQPEQKFQKVKGFGGAMTDAAALNILALSPPAQNLLLKSYFSEEGIGYNIIRVPMASCDFSIRTYTYADTPDDFQLHNFSLPEEDTKLKIPLIHRALQLSQRPVSLFASPWTSPTWLKTNGAVNGKGSLKGQPGDIYHQTWARYFVKFLDAYAEHKLQFWAVTAENEPSAGLLSGYPFQCLGFTPEHQRDFIARDLGPTLANSTHHNVRLLMLDDQRLLLPHWAKVVLTDPEAAKYVHGIAVHWYLDFLAPAKATLGETHRLFPNTMLFASEACVGSKFWEQSVRLGSWDRGMQYSHSIITNLLYYVVGWTDWNLALNPEGGPNWVRNFVDSPIIVDITKDTFYKQPMFYHLGHFSKFIPEGSQRVGLVASQKNDLDAVALLHPDGSAVVVVLNRSSKDVPFTIKDPAVGFLETISPGYSIHTYLWRRQ

SEQ ID NO: 323 - DNA, 1614 bp, synthetic construct
  misc_feature 1..1614: note = Variant of B-Glucocerebrosidase
  source 1..1614: mol_type = other DNA
atggagttttcttctcctagtagagaagaatgccccaagccactgagcagggtgagcatcatggctggatccctcacagggctgcttcttttgcaggcagtctcatgggcctctggagccaggccctgtattcccaagtcattcggctactcctcagtggtgtgtgtatgcaatgccacctattgtgacagtttcgatcctccaactctccctgctctgggtaccttctcccggtatgagagcacaagaagtggaagacgcatggagctctcaatgggccctatacaggctaaccacactgggacaggtctgctgctgaccctccaacctgaacagaagtttcagaaagtcaagggatttggaggagccatgactgatgcagcagcactcaacatcttggccctgtctccaccagcccagaatctgctgttgaagtcctacttctcagaggaggggattggctacaacatcatccgggttcccatggctagctgtgacttctccattaggacctatacatacgctgacacccccgatgattttcagctccataatttcagtctccctgaagaagacaccaaactgaagatacctctgattcacagagccttgcaactgtcccaaaggccagtgagcctcttcgcttctccctggactagtcctacatggctgaagactaatggtgctgttaatgggaaaggctccctgaaaggacagccaggtgacatatatcatcagacatgggcccgctactttgtgaaattccttgatgcctatgcagagcacaagctccaattctgggcagtcaccgcagaaaacgagccctcagctgggctgctgtctggctacccctttcagtgcttgggctttactcctgagcatcaacgggacttcattgcccgggatttggggccaacactggccaacagcacccaccacaatgtaagactcctcatgctggatgaccagaggctgctgctccctcattgggccaaggtggtgttgacagacccagaagctgccaaatatgttcatggcatcgctgtccactggtacctggattttttggcccctgcaaaggctactctgggagagacccacagactcttccccaataccatgctgtttgcatcagaagcctgcgtggggagcaaattctgggagcagtctgttaggctgggttcctgggatcggggcatgcaatattcccatagtataataactaacctcctctaccacgtggtaggatggacagactggaatctggctttgaacccagaaggaggccccaattgggtgcgcaactttgttgacagccccatcattgtggatatcacaaaggacaccttctacaaacagcctatgttctatcatctggggcactttagcaagttcattccagaggagtcccagagagtaggcttggttgcctcacagaagaatgatctggatgctgtggcactcctgcatcctgacgggagtgcagtggtggtagtactgaacaggtctagcaaagatgttcccttgactatcaaagacccagctgtgggctttctggaaaccatttcccctggatactctatccacacctatctctggagaagacagtaatga

SEQ ID NO: 324 - protein, 536 aa, synthetic construct
  REGION 1..536: note = Variant of B-Glucocerebrosidase
MEFSSPSREECPKPLSRVSIMAGSLTGLLLLQAVSWASGARPCIPKSFGYSSVVCVCNATYCDSFDPPTLPALGTFSRYESTRSGRRMELSMGPIQANHTGTGLLLTLQPEQKFQKVKGFGGAMTDAAALNILALSPPAQNLLLKSYFSEEGIGYNIIRVPMASCDFSIRTYTYADTPDDFQLHNFSLPEEDTKLKIPLIHRALQLSQRPVSLFASPWTSPTWLKTNGAVNGKGSLKGQPGDIYHQTWARYFVKFLDAYAEHKLQFWAVTAENEPSAGLLSGYPFQCLGFTPEHQRDFIARDLGPTLANSTHHNVRLLMLDDQRLLLPHWAKVVLTDPEAAKYVHGIAVHWYLDFLAPAKATLGETHRLFPNTMLFASEACVGSKFWEQSVRLGSWDRGMQYSHSIITNLLYHVVGWTDWNLALNPEGGPNWVRNFVDSPIIVDITKDTFYKQPMFYHLGHFSKFIPEESQRVGLVASQKNDLDAVALLHPDGSAVVVVLNRSSKDVPLTIKDPAVGFLETISPGYSIHTYLWRRQ

SEQ ID NO: 325 - DNA, 1614 bp, synthetic construct
  misc_feature 1..1614: note = Variant of B-Glucocerebrosidase
  source 1..1614: mol_type = other DNA
atggagttttcttctcctagtagagaagaatgccccaagccactgagcagggtgagcatcatggctggatccctcacagggctgcttcttttgcaggcagtctcatgggcctctggagccaggccctgtattcccaagtcattcggctactcctcagtggtgtgtgtatgcaatgccacctattgtgacagtttcgatcctccaactctccctgctctgggtaccttctcccggtatgagagcacaagaagtggaagacgcatggagctctcaatgggccctatacaggctaaccacactgggacaggtctgctgctgaccctccaacctgaacagaagtttcagaaagtcaagggatttggaggagccatgactgatgcagcagcactcaacatcttggccctgtctccaccagcccagaatctgctgttgaagtcctacttctcagaggaggggattggctacaacatcatccgggttcccatggctagctgtgacttctccattaggacctatacatacgctgacacccccgatgattttcagctccataatttcagtctccctgaagaagacaccaaactgaagatacctctgattcacagagccttgcaactgtcccaaaggccagtgagcctcttcgcttctccctggactagtcctacatggctgaagactaatggtgctgttaatgggaaaggctccctgaaaggacagccaggtgacatatatcatcagacatgggcccgctactttgtgaaattccttgatgcctatgcagagcacaagctccaattctgggcagtcaccgcagaaaacgagccctcagctgggctgctgtctggctacccctttcagtgcttgggctttactcctgagcatcaacgggacttcattgcccgggatttggggccaacactggccaacagcacccaccacaatgtaagactcctcatgctggatgaccagaggctgctgctccctcattgggccaaggtggtgttgacagacccagaagctgccaaatatgttcatggcatcgctgtccactggtacctggattttttggcccctgcaaaggctactctgggagagacccacagactcttccccaataccatgctgtttgcatcagaagcctgcgtggggagcaaattctgggagcagtctgttaggctgggttcctgggatcggggcatgcaatattcccatagtataataactaacctcctctaccacgtggtaggatggacagactggaatctggctttgaacccagaaggaggccccaattgggtgcgcaactttgttgacagccccatcattgtggatatcacaaaggacaccttctacaaacagcctatgttctatcatctggggcactttagcaagttcattccagagggttcccagagagtaggcttggttgcctcacagaagaatgatctggatgctgtggcactcctgcatcctgacgggagtgcagtggtggtagtactgaacaggtctagcaaagatgttcccttgactatcaaagacccagctgtgggctttctggaaaccatttccaagggatactctatccacacctatctctggagaagacagtaatga

SEQ ID NO: 326 - protein, 536 aa, synthetic construct
  REGION 1..536: note = Variant of B-Glucocerebrosidase
MEFSSPSREECPKPLSRVSIMAGSLTGLLLLQAVSWASGARPCIPKSFGYSSVVCVCNATYCDSFDPPTLPALGTFSRYESTRSGRRMELSMGPIQANHTGTGLLLTLQPEQKFQKVKGFGGAMTDAAALNILALSPPAQNLLLKSYFSEEGIGYNIIRVPMASCDFSIRTYTYADTPDDFQLHNFSLPEEDTKLKIPLIHRALQLSQRPVSLFASPWTSPTWLKTNGAVNGKGSLKGQPGDIYHQTWARYFVKFLDAYAEHKLQFWAVTAENEPSAGLLSGYPFQCLGFTPEHQRDFIARDLGPTLANSTHHNVRLLMLDDQRLLLPHWAKVVLTDPEAAKYVHGIAVHWYLDFLAPAKATLGETHRLFPNTMLFASEACVGSKFWEQSVRLGSWDRGMQYSHSIITNLLYHVVGWTDWNLALNPEGGPNWVRNFVDSPIIVDITKDTFYKQPMFYHLGHFSKFIPEGSQRVGLVASQKNDLDAVALLHPDGSAVVVVLNRSSKDVPLTIKDPAVGFLETISKGYSIHTYLWRRQ

SEQ ID NO: 327 - DNA, 1614 bp, synthetic construct
  misc_feature 1..1614: note = Variant of B-Glucocerebrosidase
  source 1..1614: mol_type = other DNA
atggagttttcttctcctagtagagaagaatgccccaagccactgagcagggtgagcatcatggctggatccctcacagggctgcttcttttgcaggcagtctcatgggcctctggagccaggccctgtattcccaagtcattcggctactcctcagtggtgtgtgtatgcaatgccacctattgtgacagtttcgatcctccaactctccctgctctgggtaccttctcccggtatgagagcacaagaagtggaagacgcatggagctctcaatgggccctatacaggctaaccacactgggacaggtctgctgctgaccctccaacctgaacagaagtttcagaaagtcaagggatttggaggagccatgactgatgcagcagcactcaacatcttggccctgtctccaccagcccagaatctgctgttgaagtcctacttctcagaggaggggattggctacaacatcatccgggttcccatggctagctgtgacttctccattaggacctatacatacgctgacacccccgatgattttcagctccataatttcagtctccctgaagaagacaccaaactgaagatacctctgattcacagagccttgcaactgtcccaaaggccagtgagcctcttcgcttctccctggactagtcctacatggctgaagactaatggtgctgttaatgggaaaggctccctgaaaggacagccaggtgacatatatcatcagacatgggcccgctactttgtgaaattccttgatgcctatgcagagcacaagctccaattctgggcagtcaccgcagaaaacgagccctcagctgggctgctgtctggctacccctttcagtgcttgggctttactcctgagcatcaacgggacttcattgcccgggatttggggccaacactggccaacagcacccaccacaatgtaagactcctcatgctggatgaccagaggctgctgctccctcattgggccaaggtggtgttgacagacccagaagctgccaaatatgttcatggcatcgctgtccactggtacctggattttttggcccctgcaaaggctactctgggagagacccacagactcttccccaataccatgctgtttgcatcagaagcctgcgtggggagcaaattctgggagcagtctgttaggctgggttcctgggatcggggcatgcaatattcccatagtataataactaacctcctctaccacgtggtaggatggacagactggaatctggctttgaacccagaaggaggccccaattgggtgcgcaactttgttgacagccccatcattgtggatatcacaaaggacaccttctacaaacagcctatgttctatcatctggggcactttagcaagttcattccagagggttcccagagagtaggcttggttgcctcacagaagaatgatctggatgctgtggcactcctgcatcctgacgggagtgcagtggtggtagtactgaacaggtctagcaaagatatgcccttgactatcaaagacccagctgtgggctttctggaaaccatttcccctggatactctatccacacctatctctggagaagacagtaatga

SEQ ID NO: 328 - protein, 536 aa, synthetic construct
  REGION 1..536: note = Variant of B-Glucocerebrosidase
MEFSSPSREECPKPLSRVSIMAGSLTGLLLLQAVSWASGARPCIPKSFGYSSVVCVCNATYCDSFDPPTLPALGTFSRYESTRSGRRMELSMGPIQANHTGTGLLLTLQPEQKFQKVKGFGGAMTDAAALNILALSPPAQNLLLKSYFSEEGIGYNIIRVPMASCDFSIRTYTYADTPDDFQLHNFSLPEEDTKLKIPLIHRALQLSQRPVSLFASPWTSPTWLKTNGAVNGKGSLKGQPGDIYHQTWARYFVKFLDAYAEHKLQFWAVTAENEPSAGLLSGYPFQCLGFTPEHQRDFIARDLGPTLANSTHHNVRLLMLDDQRLLLPHWAKVVLTDPEAAKYVHGIAVHWYLDFLAPAKATLGETHRLFPNTMLFASEACVGSKFWEQSVRLGSWDRGMQYSHSIITNLLYHVVGWTDWNLALNPEGGPNWVRNFVDSPIIVDITKDTFYKQPMFYHLGHFSKFIPEGSQRVGLVASQKNDLDAVALLHPDGSAVVVVLNRSSKDMPLTIKDPAVGFLETISPGYSIHTYLWRRQ

SEQ ID NO: 329 - DNA, 1614 bp, synthetic construct
  misc_feature 1..1614: note = Variant of B-Glucocerebrosidase
  source 1..1614: mol_type = other DNA
atggagttttcttctcctagtagagaagaatgccccaagccactgagcagggtgagcatcatggctggatccctcacagggctgcttcttttgcaggcagtctcatgggcctctggagccaggccctgtattcccaagtcattcggctactcctcagtggtgtgtgtatgcaatgccacctattgtgacagtttcgatcctccaactctccctgctctgggtaccttctcccggtatgagagcacaagaagtggaagacgcatggagctctcaatgggccctatacaggctaaccacactgggacaggtctgctgctgaccctccaacctgaacagaagtttcagaaagtcaagggatttggaggagccatgactgatgcagcagcactcaacatcttggccctgtctccaccagcccagaatctgctgttgaagtcctacttctcagaggaggggattggctacaacatcatccgggttcccatggctagctgtgacttctccattaggacctatacatacgctgacacccccgatgattttcagctccataatttcagtctccctgaagaagacaccaaactgaagatacctctgattcacagagccttgcaactgtcccaaaggccagtgagcctcttcgcttctccctggactagtcctacatggctgaagactaatggtgctgttaatgggaaaggctccctgaaaggacagccaggtgacatatatcatcagacatgggcccgctactttgtgaaattccttgatgcctatgcagagcacaagctccaattctgggcagtcaccgcagaaaacgagccctcagctgggctgctgtctggctacccctttcagtgcttgggctttactcctgagcatcaacgggacttcattgcccgggatttggggccaacactggccaacagcacccaccacaatgtaagactcctcatgctggatgaccagaggctgctgctccctcattgggccaaggtggtgttgacagacccagaagctgccaaatatgttcatggcatcgctgtccactggtacctggattttttggcccctgcaaaggctactctgggagagacccacagactcttccccaataccatgctgtttgcatcagaagcctgcgtggggagcaaattctgggagcagtctgttaggctgggttcctgggatcggggcatgcaatattcccatagtataataactaacctcctctaccacgtggtaggatggacagactggaatctggctttgaacccagaaggaggccccaattgggtgcgcaactttgttgacagccccatcattgtggatatcacaaaggacaccttctacaaacagcctatgttctatcatctggggcactttagcaagttcattccagagggttcccagagagtaggcttggttgcctcacagaagaatgatctggatgctgtggcactcctgcatcctgacgggagtgcagtggtggtagtactgaacaggtctagcaaagatgttcccattactatcaaagacccagctgtgggctttctggaaaccatttcccctggatactctatccacacctatctctggagaagacagtaatga

SEQ ID NO: 330 - protein, 536 aa, synthetic construct
  REGION 1..536: note = Variant of B-Glucocerebrosidase
MEFSSPSREECPKPLSRVSIMAGSLTGLLLLQAVSWASGARPCIPKSFGYSSVVCVCNATYCDSFDPPTLPALGTFSRYESTRSGRRMELSMGPIQANHTGTGLLLTLQPEQKFQKVKGFGGAMTDAAALNILALSPPAQNLLLKSYFSEEGIGYNIIRVPMASCDFSIRTYTYADTPDDFQLHNFSLPEEDTKLKIPLIHRALQLSQRPVSLFASPWTSPTWLKTNGAVNGKGSLKGQPGDIYHQTWARYFVKFLDAYAEHKLQFWAVTAENEPSAGLLSGYPFQCLGFTPEHQRDFIARDLGPTLANSTHHNVRLLMLDDQRLLLPHWAKVVLTDPEAAKYVHGIAVHWYLDFLAPAKATLGETHRLFPNTMLFASEACVGSKFWEQSVRLGSWDRGMQYSHSIITNLLYHVVGWTDWNLALNPEGGPNWVRNFVDSPIIVDITKDTFYKQPMFYHLGHFSKFIPEGSQRVGLVASQKNDLDAVALLHPDGSAVVVVLNRSSKDVPITIKDPAVGFLETISPGYSIHTYLWRRQ

SEQ ID NO: 331 - DNA, 1614 bp, synthetic construct
  misc_feature 1..1614: note = Variant of B-Glucocerebrosidase
  source 1..1614: mol_type = other DNA
atggagttttcttctcctagtagagaagaatgccccaagccactgagcagggtgagcatcatggctggatccctcacagggctgcttcttttgcaggcagtctcatgggcctctggagccaggccctgtattcccaagtcattcggctactcctcagtggtgtgtgtatgcaatgccacctattgtgacagtttcgatcctccaactctccctgctctgggtaccttctcccggtatgagagcacaagaagtggaagacgcatggagctctcaatgggccctatacaggctaaccacactgggacaggtctgctgctgaccctccaacctgaacagaagtttcagaaagtcaagggatttggaggagccatgactgatgcagcagcactcaacatcttggccctgtctccaccagcccagaatctgctgttgaagtcctacttctcagaggaggggattggctacaacatcatccgggttcccatggctagctgtgacttctccattaggacctatacatacgctgacacccccgatgattttcagctccataatttcagtctccctgaagaagacaccaaactgaagatacctctgattcacagagccttgcaactgtcccaaaggccagtgagcctcttcgcttctccctggactagtcctacatggctgaagactaatggtgctgttaatgggaaaggctccctgaaaggacagccaggtgacatatatcatcagacatgggcccgctactttgtgaaattccttgatgcctatgcagagcacaagctccaattctgggcagtcaccgcagaaaacgagccctcagctgggctgctgtctggctacccctttcagtgcttgggctttactcctgagcatcaacgggacttcattgcccgggatttggggccaacactggccaacagcacccaccacaatgtaagactcctcatgctggatgaccagaggctgctgctccctcattgggccaaggtggtgttgacagacccagaagctgccaaatatgttcatggcatcgctgtccactggtacctggattttttggcccctgcaaaggctactctgggagagacccacagactcttccccaataccatgctgtttgcatcagaagcctgcgtggggagcaaattctgggagcagtctgttaggctgggttcctgggatcggggcatgcaatattcccatagtataataactaacctcctctaccacgtggtaggatggacagactggaatctggctttgaacccagaaggaggccccaattgggtgcgcaactttgttgacagccccatcattgtggatatcacaaaggacaccttctacaaacagcctatgttctatcatctggggcactttagcaagttcattccagagggttcccagagagtaggcttggttgcctcacagaagaatgatctggatgctgtggcactcctgcatcctgacgggagtgcagtggtggtagtactgaacaggtctagcaaagatgttcccttgactatcaaagacccagctgtgggctttctggaaaccatttcccctcagtactctatccacacctatctctggagaagacagtaatga

SEQ ID NO: 332 - protein, 536 aa, synthetic construct
  REGION 1..536: note = Variant of B-Glucocerebrosidase
MEFSSPSREECPKPLSRVSIMAGSLTGLLLLQAVSWASGARPCIPKSFGYSSVVCVCNATYCDSFDPPTLPALGTFSRYESTRSGRRMELSMGPIQANHTGTGLLLTLQPEQKFQKVKGFGGAMTDAAALNILALSPPAQNLLLKSYFSEEGIGYNIIRVPMASCDFSIRTYTYADTPDDFQLHNFSLPEEDTKLKIPLIHRALQLSQRPVSLFASPWTSPTWLKTNGAVNGKGSLKGQPGDIYHQTWARYFVKFLDAYAEHKLQFWAVTAENEPSAGLLSGYPFQCLGFTPEHQRDFIARDLGPTLANSTHHNVRLLMLDDQRLLLPHWAKVVLTDPEAAKYVHGIAVHWYLDFLAPAKATLGETHRLFPNTMLFASEACVGSKFWEQSVRLGSWDRGMQYSHSIITNLLYHVVGWTDWNLALNPEGGPNWVRNFVDSPIIVDITKDTFYKQPMFYHLGHFSKFIPEGSQRVGLVASQKNDLDAVALLHPDGSAVVVVLNRSSKDVPLTIKDPAVGFLETISPQYSIHTYLWRRQ

SEQ ID NO: 333 - DNA, 1614 bp, synthetic construct
  misc_feature 1..1614: note = Variant of B-Glucocerebrosidase
  source 1..1614: mol_type = other DNA
atggagttttcttctcctagtagagaagaatgccccaagccactgagcagggtgagcatcatggctggatccctcacagggctgcttcttttgcaggcagtctcatgggcctctggagccaggccctgtattcccaagtcattcggctactcctcagtggtgtgtgtatgcaatgccacctattgtgacagtttcgatcctccaactctccctgctctgggtaccttctcccggtatgagagcacaagaagtggaagacgcatggagctctcaatgggccctatacaggctaaccacactgggacaggtctgctgctgaccctccaacctgaacagaagtttcagaaagtcaagggatttggaggagccatgactgatgcagcagcactcaacatcttggccctgtctccaccagcccagaatctgctgttgaagtcctacttctcagaggaggggattggctacaacatcatccgggttcccatggctagctgtgacttctccattaggacctatacatacgctgacacccccgatgattttcagctccataatttcagtctccctgaagaagacaccaaactgaagatacctctgattcacagagccttgcaactgtcccaaaggccagtgagcctcttcgcttctccctggactagtcctacatggctgaagactaatggtgctgttaatgggaaaggctccctgaaaggacagccaggtgacatatatcatcagacatgggcccgctactttgtgaaattccttgatgcctatgcagagcacaagctccaattctgggcagtcaccgcagaaaacgagccctcagctgggctgctgtctggctacccctttcagtgcttgggctttactcctgagcatcaacgggacttcattgcccgggatttggggccaacactggccaacagcacccaccacaatgtaagactcctcatgctggatgaccagaggctgctgctccctcattgggccaaggtggtgttgacagacccagaagctgccaaatatgttcatggcatcgctgtccactggtacctggattttttggcccctgcaaaggctactctgggagagacccacagactcttccccaataccatgctgtttgcatcagaagcctgcgtggggagcaaattctgggagcagtctgttaggctgggttcctgggatcggggcatgcaatattcccatagtataataactaacctcctctaccacgtggtaggatggacagactggaatctggctttgaacccagaaggaggccccaattgggtgcgcaactttgttgacagccccatcattgtggatatcacaaaggacaccttctacaaacagcctatgttctatcatctggggcactttagcaagttcattccagagggttcccagagagtaggcttggttgcctcacagaagaatgatctggatgctgtggcactcgctcatcctgacgggagtgcagtggtggtagtactgaacaggtctagcaaagatgttcccttgactatcaaagacccagctgtgggctttctggaaaccatttcccctggatactctatccacacctatctctggagaagacagtaatga

SEQ ID NO: 334 - protein, 536 aa, synthetic construct
  REGION 1..536: note = Variant of B-Glucocerebrosidase
MEFSSPSREECPKPLSRVSIMAGSLTGLLLLQAVSWASGARPCIPKSFGYSSVVCVCNATYCDSFDPPTLPALGTFSRYESTRSGRRMELSMGPIQANHTGTGLLLTLQPEQKFQKVKGFGGAMTDAAALNILALSPPAQNLLLKSYFSEEGIGYNIIRVPMASCDFSIRTYTYADTPDDFQLHNFSLPEEDTKLKIPLIHRALQLSQRPVSLFASPWTSPTWLKTNGAVNGKGSLKGQPGDIYHQTWARYFVKFLDAYAEHKLQFWAVTAENEPSAGLLSGYPFQCLGFTPEHQRDFIARDLGPTLANSTHHNVRLLMLDDQRLLLPHWAKVVLTDPEAAKYVHGIAVHWYLDFLAPAKATLGETHRLFPNTMLFASEACVGSKFWEQSVRLGSWDRGMQYSHSIITNLLYHVVGWTDWNLALNPEGGPNWVRNFVDSPIIVDITKDTFYKQPMFYHLGHFSKFIPEGSQRVGLVASQKNDLDAVALAHPDGSAVVVVLNRSSKDVPLTIKDPAVGFLETISPGYSIHTYLWRRQ

SEQ ID NO: 335 - DNA, 1614 bp, synthetic construct
  misc_feature 1..1614: note = Variant of B-Glucocerebrosidase
  source 1..1614: mol_type = other DNA
atggagttttcttctcctagtagagaagaatgccccaagccactgagcagggtgagcatcatggctggatccctcacagggctgcttcttttgcaggcagtctcatgggcctctggagccaggccctgtattcccaagtcattcggctactcctcagtggtgtgtgtatgcaatgccacctattgtgacagtttcgatcctccaactctccctgctctgggtaccttctcccggtatgagagcacaagaagtggaagacgcatggagctctcaatgggccctatacaggctaaccacactgggacaggtatgctgctgaccctccaacctgaacagaagtttcagaaagtcaagggatttggaggagccatgactgatgcagcagcactcaacatcttggccctgtctccaccagcccagaatctgctgttgaagtcctacttctcagaggaggggattggctacaacatcatccgggttcccatggctagctgtgacttctccattaggacctatacatacgctgacacccccgatgattttcagctccataatttcagtctccctgaagaagacaccaaactgaagatacctctgattcacagagccttgcaactgtcccaaaggccagtgagcctcttcgcttctccctggactagtcctacatggctgaagactaatggtgctgttaatgggaaaggctccctgaaaggacagccaggtgacatatatcatcagacatgggcccgctactttgtgaaattccttgatgcctatgcagagcacaagctccaattctgggcagtcaccgcagaaaacgagccctcagctgggctgctgtctggctacccctttcagtgcttgggctttactcctgagcatcaacgggacttcattgcccgggatttggggccaacactggccaacagcacccaccacaatgtaagactcctcatgctggatgaccagaggctgctgctccctcattgggccaaggtggtgttgacagacccagaagctgccaaatatgttcatggcatcgctgtccactggtacctggattttttggcccctgcaaaggctactctgggagagacccacagactcttccccaataccatgctgtttgcatcagaagcctgcgtggggagcaaattctgggagcagtctgttaggctgggttcctgggatcggggcatgcaatattcccatagtataataactaacctcctctaccacgtggtaggatggacagactggaatctggctttgaacccagaaggaggccccaattgggtgcgcaactttgttgacagccccatcattgtggatatcacaaaggacaccttctacaaacagcctatgttctatcatctggggcactttagcaagttcattccagagggttcccagagagtaggcttggttgcctcacagaagaatgatctggatgctgtggcactcctgcatcctgacgggagtgcagtggtggtagtactgaacaggtctagcaaagatgttcccttgactatcaaagacccagctgtgggctttctggaaaccatttcccctggatactctatccacacctatctctggagaagacagtaatga

SEQ ID NO: 336 - protein, 536 aa, synthetic construct
  REGION 1..536: note = Variant of B-Glucocerebrosidase
MEFSSPSREECPKPLSRVSIMAGSLTGLLLLQAVSWASGARPCIPKSFGYSSVVCVCNATYCDSFDPPTLPALGTFSRYESTRSGRRMELSMGPIQANHTGTGMLLTLQPEQKFQKVKGFGGAMTDAAALNILALSPPAQNLLLKSYFSEEGIGYNIIRVPMASCDFSIRTYTYADTPDDFQLHNFSLPEEDTKLKIPLIHRALQLSQRPVSLFASPWTSPTWLKTNGAVNGKGSLKGQPGDIYHQTWARYFVKFLDAYAEHKLQFWAVTAENEPSAGLLSGYPFQCLGFTPEHQRDFIARDLGPTLANSTHHNVRLLMLDDQRLLLPHWAKVVLTDPEAAKYVHGIAVHWYLDFLAPAKATLGETHRLFPNTMLFASEACVGSKFWEQSVRLGSWDRGMQYSHSIITNLLYHVVGWTDWNLALNPEGGPNWVRNFVDSPIIVDITKDTFYKQPMFYHLGHFSKFIPEGSQRVGLVASQKNDLDAVALLHPDGSAVVVVLNRSSKDVPLTIKDPAVGFLETISPGYSIHTYLWRRQ

SEQ ID NO: 337 - DNA, 1614 bp, synthetic construct
  misc_feature 1..1614: note = Variant of B-Glucocerebrosidase
  source 1..1614: mol_type = other DNA
atggagttttcttctcctagtagagaagaatgccccaagccactgagcagggtgagcatcatggctggatccctcacagggctgcttcttttgcaggcagtctcatgggcctctggagccaggccctgtattcccaagtcattcggctactcctcagtggtgtgtgtatgcaatgccacctattgtgacagtttcgatcctccaactctccctgctctgggtaccttctcccggtatgagagcacaagaagtggaagacgcatggagctctcaatgggccctatacaggctaaccacactgggacaggtctgctgctgaccctccaacctgaacagaagtttcagaaagtcaagggatttggaggagccatgactgatgcagcagcactcaacatcttggccctgtctccaccagcccagaatctgctgttgaagtcctacttctcagaggaggggattggctacaacatcatccgggttcccatggctagctgtgacttctccattaggacctatacatacgctgacacccccgatgattttcagctccataatttcagtctccctgaagaagacaccaaactgaagatacctctgattcacagagccttgcaactgtcccaaaggccagtgagcctcttcgcttctccctggactagtcctacatggctgaagactaatggtgctgttaatgggaaaggctccctgaaaggacagccaggtgacatatatcatcagacatgggcccgctactttgtgaaattccttgatgcctatgcagagcacaagctccaattctgggcagtcaccgcagaaaacgagccctcagctgggctgctgtctggctacccctttcagtgcttgggctttactcctgagcatcaacgggacttcattgcccgggatttggggccaacactggccaacagcacccaccacaatgtaagactcctcatgctggatgaccagaggctgctgctccctcattgggccaaggtggtgttgacagacccagaagctgccaaatatgttcatggcatcgctgtccactggtacctggattttttggcccctgcaaaggctactctgggagagacccacagactcttccccaataccatgctgtttgcatcagaagcctgcgtggggagcaaattctgggagcagtctgttaggctgggttcctgggatcggggcatgcaatattcccatagtataataactaacctcctctaccacgtggtaggatggacagactggaatctggctttgaacccagaaggaggccccaattgggtgcgcaactttgttgacagccccatcattgtggatatcacaaaggacaccttctacaaacagcctatgttctatcatctggggcactttagcaagttcattccagagggttcccagagagtaggcttggttgcctcacagaagaatgatctggatgctgtggcactcctgcatcctgacgggagtgcagtggtggtagtactgaacaggtctagcaaagatgcgcccttgactatcaaagacccagctgtgggctttctggaaaccatttcccctggatactctatccacacctatctctggagaagacagtaatga

SEQ ID NO: 338 - protein, 536 aa, synthetic construct
  REGION 1..536: note = Variant of B-Glucocerebrosidase
MEFSSPSREECPKPLSRVSIMAGSLTGLLLLQAVSWASGARPCIPKSFGYSSVVCVCNATYCDSFDPPTLPALGTFSRYESTRSGRRMELSMGPIQANHTGTGLLLTLQPEQKFQKVKGFGGAMTDAAALNILALSPPAQNLLLKSYFSEEGIGYNIIRVPMASCDFSIRTYTYADTPDDFQLHNFSLPEEDTKLKIPLIHRALQLSQRPVSLFASPWTSPTWLKTNGAVNGKGSLKGQPGDIYHQTWARYFVKFLDAYAEHKLQFWAVTAENEPSAGLLSGYPFQCLGFTPEHQRDFIARDLGPTLANSTHHNVRLLMLDDQRLLLPHWAKVVLTDPEAAKYVHGIAVHWYLDFLAPAKATLGETHRLFPNTMLFASEACVGSKFWEQSVRLGSWDRGMQYSHSIITNLLYHVVGWTDWNLALNPEGGPNWVRNFVDSPIIVDITKDTFYKQPMFYHLGHFSKFIPEGSQRVGLVASQKNDLDAVALLHPDGSAVVVVLNRSSKDAPLTIKDPAVGFLETISPGYSIHTYLWRRQ

SEQ ID NO: 339 - DNA, 1614 bp, synthetic construct
  misc_feature 1..1614: note = Variant of B-Glucocerebrosidase
  source 1..1614: mol_type = other DNA
atggagttttcttctcctagtagagaagaatgccccaagccactgagcagggtgagcatcatggctggatccctcacagggctgcttcttttgcaggcagtctcatgggcctctggagccaggccctgtattcccaagtcattcggctactcctcagtggtgtgtgtatgcaatgccacctattgtgacagtttcgatcctccaactctccctgctctgggtaccttctcccggtatgagagcacaagaagtggaagacgcatggagctctcaatgggccctggtcaggctaaccacactgggacaggtctgctgctgaccctccaacctgaacagaagtttcagaaagtcaagggatttggaggagccatgactgatgcagcagcactcaacatcttggccctgtctccaccagcccagaatctgctgttgaagtcctacttctcagaggaggggattggctacaacatcatccgggttcccatggctagctgtgacttctccattaggacctatacatacgctgacacccccgatgattttcagctccataatttcagtctccctgaagaagacaccaaactgaagatacctctgattcacagagccttgcaactgtcccaaaggccagtgagcctcttcgcttctccctggactagtcctacatggctgaagactaatggtgctgttaatgggaaaggctccctgaaaggacagccaggtgacatatatcatcagacatgggcccgctactttgtgaaattccttgatgcctatgcagagcacaagctccaattctgggcagtcaccgcagaaaacgagccctcagctgggctgctgtctggctacccctttcagtgcttgggctttactcctgagcatcaacgggacttcattgcccgggatttggggccaacactggccaacagcacccaccacaatgtaagactcctcatgctggatgaccagaggctgctgctccctcattgggccaaggtggtgttgacagacccagaagctgccaaatatgttcatggcatcgctgtccactggtacctggattttttggcccctgcaaaggctactctgggagagacccacagactcttccccaataccatgctgtttgcatcagaagcctgcgtggggagcaaattctgggagcagtctgttaggctgggttcctgggatcggggcatgcaatattcccatagtataataactaacctcctctaccacgtggtaggatggacagactggaatctggctttgaacccagaaggaggccccaattgggtgcgcaactttgttgacagccccatcattgtggatatcacaaaggacaccttctacaaacagcctatgttctatcatctggggcactttagcaagttcattccagagggttcccagagagtaggcttggttgcctcacagaagaatgatctggatgctgtggcactcctgcatcctgacgggagtgcagtggtggtagtactgaacaggtctagcaaagatgttcccttgactatcaaagacccagctgtgggctttctggaaaccatttcccctggatactctatccacacctatctctggagaagacagtaatga

SEQ ID NO: 340 - protein, 536 aa, synthetic construct
  REGION 1..536: note = Variant of B-Glucocerebrosidase
MEFSSPSREECPKPLSRVSIMAGSLTGLLLLQAVSWASGARPCIPKSFGYSSVVCVCNATYCDSFDPPTLPALGTFSRYESTRSGRRMELSMGPGQANHTGTGLLLTLQPEQKFQKVKGFGGAMTDAAALNILALSPPAQNLLLKSYFSEEGIGYNIIRVPMASCDFSIRTYTYADTPDDFQLHNFSLPEEDTKLKIPLIHRALQLSQRPVSLFASPWTSPTWLKTNGAVNGKGSLKGQPGDIYHQTWARYFVKFLDAYAEHKLQFWAVTAENEPSAGLLSGYPFQCLGFTPEHQRDFIARDLGPTLANSTHHNVRLLMLDDQRLLLPHWAKVVLTDPEAAKYVHGIAVHWYLDFLAPAKATLGETHRLFPNTMLFASEACVGSKFWEQSVRLGSWDRGMQYSHSIITNLLYHVVGWTDWNLALNPEGGPNWVRNFVDSPIIVDITKDTFYKQPMFYHLGHFSKFIPEGSQRVGLVASQKNDLDAVALLHPDGSAVVVVLNRSSKDVPLTIKDPAVGFLETISPGYSIHTYLWRRQ

SEQ ID NO: 341 - DNA, 1614 bp, synthetic construct
  misc_feature 1..1614: note = Variant of B-Glucocerebrosidase
  source 1..1614: mol_type = other DNA
atggagttttcttctcctagtagagaagaatgccccaagccactgagcagggtgagcatcatggctggatccctcacagggctgcttcttttgcaggcagtctcatgggcctctggagccaggccctgtattcccaagtcattcggctactcctcagtggtgtgtgtatgcaatgccacctattgtgacagtttcgatcctccaactctccctgctctgggtaccttctcccggtatgagagcacaagaagtggaagacgcatggagctctcaatgggccctatacaggctaaccacactgggacaggtctgctgctgaccctccaacctgaacagaagtttcagaaagtcaagggatttggaggagccatgactgatgcagcagcactcaacatcttggccctgtctccaccagcccagaatctgctgttgaagtcctacttctcagaggaggggattggctacaacatcatccgggttcccatggctagctgtgacttctccattaggacctatacatacgctgacacccccgatgattttcagctccataatttcagtctccctgaagaagacaccaaactgaagatacctctgattcacagagccttgcaactgtcccaaaggccagtgagcctcttcgcttctccctggactagtcctacatggctgaagactaatggtgctgttaatgggaaaggctccctgaaaggacagccaggtgacatatatcatcagacatgggcccgctactttgtgaaattccttgatgcctatgcagagcacaagctccaattctgggcagtcaccgcagaaaacgagccctcagctgggctgctgtctggctacccctttcagtgcttgggctttactcctgagcatcaacgggacttcattgcccgggatttggggccaacactggccaacagcacccaccacaatgtaagactcctcatgctggatgaccagaggctgctgctccctcattgggccaaggtggtgttgacagacccagaagctgccaaatatgttcatggcatcgctgtccactggtacctggattttttggcccctgagaaggctactctgggagagacccacagactcttccccaataccatgctgtttgcatcagaagcctgcgtggggagcaaattctgggagcagtctgttaggctgggttcctgggatcggggcatgcaatattcccatagtataataactaacctcctctaccacgtggtaggatggacagactggaatctggctttgaacccagaaggaggccccaattgggtgcgcaactttgttgacagccccatcattgtggatatcacaaaggacaccttctacaaacagcctatgttctatcatctggggcactttagcaagttcattccagagggttcccagagagtaggcttggttgcctcacagaagaatgatctggatgctgtggcactcctgcatcctgacgggagtgcagtggtggtagtactgaacaggtctagcaaagatgttcccttgactatcaaagacccagctgtgggctttctggaaaccatttcccctggatactctatccacacctatctctggagaagacagtaatga

SEQ ID NO: 342 - protein, 536 aa, synthetic construct
  REGION 1..536: note = Variant of B-Glucocerebrosidase
MEFSSPSREECPKPLSRVSIMAGSLTGLLLLQAVSWASGARPCIPKSFGYSSVVCVCNATYCDSFDPPTLPALGTFSRYESTRSGRRMELSMGPIQANHTGTGLLLTLQPEQKFQKVKGFGGAMTDAAALNILALSPPAQNLLLKSYFSEEGIGYNIIRVPMASCDFSIRTYTYADTPDDFQLHNFSLPEEDTKLKIPLIHRALQLSQRPVSLFASPWTSPTWLKTNGAVNGKGSLKGQPGDIYHQTWARYFVKFLDAYAEHKLQFWAVTAENEPSAGLLSGYPFQCLGFTPEHQRDFIARDLGPTLANSTHHNVRLLMLDDQRLLLPHWAKVVLTDPEAAKYVHGIAVHWYLDFLAPEKATLGETHRLFPNTMLFASEACVGSKFWEQSVRLGSWDRGMQYSHSIITNLLYHVVGWTDWNLALNPEGGPNWVRNFVDSPIIVDITKDTFYKQPMFYHLGHFSKFIPEGSQRVGLVASQKNDLDAVALLHPDGSAVVVVLNRSSKDVPLTIKDPAVGFLETISPGYSIHTYLWRRQ

SEQ ID NO: 343 - DNA, 1614 bp, synthetic construct
  misc_feature 1..1614: note = Variant of B-Glucocerebrosidase
  source 1..1614: mol_type = other DNA
atggagttttcttctcctagtagagaagaatgccccaagccactgagcagggtgagcatcatggctggatccctcacagggctgcttcttttgcaggcagtctcatgggcctctggagccaggccctgtattcccaagtcattcggctactcctcagtggtgtgtgtatgcaatgccacctattgtgacagtttcgatcctccaactctccctgctctgggtaccttctcccggtatgagagcacaagaagtggaagacgcatggagctctcaatgggccctatacaggctaaccacactgggacaggtctgctgctgaccctccaacctgaacagaagtttcagaaagtcaagggatttggaggagccatgactgatgcagcagcactcaacatcttggccctgtctccaccagcccagaatctgctgttgaagtcctacttctcagaggaggggattggctacaacatcatccgggttcccatggctagctgtgacttctccattaggacctatacatacgctgacacccccgatgattttcagctccataatttcagtctccctgaagaagacaccaaactgaagatacctctgattcacagagccttgcaactgtcccaaaggccagtgagcctcttcgcttctccctggactagtcctacatggctgaagactaatggtgctgttaatgggaaaggctccctgaaaggacagccaggtgacatatatcatcagacatgggcccgctactttgtgaaattccttgatgcctatgcagagcacaagctccaattctgggcagtcaccgcagaaaacgagccctcagctgggctgctgtctggctacccctttcagtgcttgggctttactcctgagcatcaacgggacttcattgcccgggatttggggccaacactggccaacagcacccaccacaatgtaagactcctcatgctggatgaccagaggctgctgctccctcattgggccaaggtggtgttgacagacccagaagctgccaaatatgttcatggcatcgctgtccactggtacctggattttttggcccctgcaaaggctactctgggagagacccacagactcttccccaataccgttctgtttgcatcagaagcctgcgtggggagcaaattctgggagcagtctgttaggctgggttcctgggatcggggcatgcaatattcccatagtataataactaacctcctctaccacgtggtaggatggacagactggaatctggctttgaacccagaaggaggccccaattgggtgcgcaactttgttgacagccccatcattgtggatatcacaaaggacaccttctacaaacagcctatgttctatcatctggggcactttagcaagttcattccagagggttcccagagagtaggcttggttgcctcacagaagaatgatctggatgctgtggcactcctgcatcctgacgggagtgcagtggtggtagtactgaacaggtctagcaaagatgttcccttgactatcaaagacccagctgtgggctttctggaaaccatttcccctggatactctatccacacctatctctggagaagacagtaatga

SEQ ID NO: 344 - protein, 536 aa, synthetic construct
  REGION 1..536: note = Variant of B-Glucocerebrosidase
MEFSSPSREECPKPLSRVSIMAGSLTGLLLLQAVSWASGARPCIPKSFGYSSVVCVCNATYCDSFDPPTLPALGTFSRYESTRSGRRMELSMGPIQANHTGTGLLLTLQPEQKFQKVKGFGGAMTDAAALNILALSPPAQNLLLKSYFSEEGIGYNIIRVPMASCDFSIRTYTYADTPDDFQLHNFSLPEEDTKLKIPLIHRALQLSQRPVSLFASPWTSPTWLKTNGAVNGKGSLKGQPGDIYHQTWARYFVKFLDAYAEHKLQFWAVTAENEPSAGLLSGYPFQCLGFTPEHQRDFIARDLGPTLANSTHHNVRLLMLDDQRLLLPHWAKVVLTDPEAAKYVHGIAVHWYLDFLAPAKATLGETHRLFPNTVLFASEACVGSKFWEQSVRLGSWDRGMQYSHSIITNLLYHVVGWTDWNLALNPEGGPNWVRNFVDSPIIVDITKDTFYKQPMFYHLGHFSKFIPEGSQRVGLVASQKNDLDAVALLHPDGSAVVVVLNRSSKDVPLTIKDPAVGFLETISPGYSIHTYLWRRQ

SEQ ID NO: 345 - DNA, 1614 bp, synthetic construct
  misc_feature 1..1614: note = Variant of B-Glucocerebrosidase
  source 1..1614: mol_type = other DNA
atggagttttcttctcctagtagagaagaatgccccaagccactgagcagggtgagcatcatggctggatccctcacagggctgcttcttttgcaggcagtctcatgggcctctggagccaggccctgtattcccaagtcattcggctactcctcagtggtgtgtgtatgcaatgccacctattgtgacagtttcgatcctccaactctccctgctctgggtaccttctcccggtatgagagcacaagaagtggaagacgcatggagctctcaatgggccctatacaggctaaccacactgggacaggtctgctgctgaccctccaacctgaacagaagtttcagaaagtcaagggatttggaggagccatgactgatgcagcagcactcaacatcttggccctgtctccaccagcccagaatctgctgttgaagtcctacttctcagaggaggggattggctacaacatcatccgggttcccatggctagctgtgacttctccattaggacctatacatacgctgacacccccgatgattttcagctccataatttcagtctccctgaagaagacaccaaactgaagatacctctgattcacagagccttgcaactgtcccaaaggccagtgagcctcttcgcttctccctggactagtcctacatggctgaagactaatggtgctgttaatgggaaaggctccctgaaaggacagccaggtgacatatatcatcagacatgggcccgctactttgtgaaattccttgatgcctatgcagagcacaagctccaattctgggcagtcaccgcagaaaacgagccctcagctgggctgctgtctggctacccctttcagtgcttgggctttactcctgagcatcaacgggacttcattgcccgggatttggggccaacactggccaacagcacccaccacaatgtaagactcctcatgctggatgaccagaggctgctgctccctcattgggccaaggtggtgttgacagacccagaagctgccaaatatgttcatggcatcgctgtccactggtacctggattttttggcccctgcaaaggctactctgggagagacccacagactcttccccaataccatgctgtttgcatcagaagcctgcgtggggagcaaattctgggagcagtctgttaggctgggttcctgggatcggggcatgcaatattcccatagtataataactaacctcctctaccacgtggtaggatggacagactggaatctggctttgaacccagaaggaggccccaattgggtgcgcaactttgttgacagccccatcattgtggatatcacaaaggacaccttctacaaacagcctatgttctatcatctggggcactttagcaagttcattccagagggttcccagagagtaggcttggttgcctcacagaagaatgatctggatgctgtggcactcctgcatcctgacgggagtgcagtggtggtagtactgaacaggtctagcaaagatgttccctggactatcaaagacccagctgtgggctttctggaaaccatttcccctggatactctatccacacctatctctggagaagacagtaatga

SEQ ID NO: 346 - protein, 536 aa, synthetic construct
  REGION 1..536: note = Variant of B-Glucocerebrosidase
MEFSSPSREECPKPLSRVSIMAGSLTGLLLLQAVSWASGARPCIPKSFGYSSVVCVCNATYCDSFDPPTLPALGTFSRYESTRSGRRMELSMGPIQANHTGTGLLLTLQPEQKFQKVKGFGGAMTDAAALNILALSPPAQNLLLKSYFSEEGIGYNIIRVPMASCDFSIRTYTYADTPDDFQLHNFSLPEEDTKLKIPLIHRALQLSQRPVSLFASPWTSPTWLKTNGAVNGKGSLKGQPGDIYHQTWARYFVKFLDAYAEHKLQFWAVTAENEPSAGLLSGYPFQCLGFTPEHQRDFIARDLGPTLANSTHHNVRLLMLDDQRLLLPHWAKVVLTDPEAAKYVHGIAVHWYLDFLAPAKATLGETHRLFPNTMLFASEACVGSKFWEQSVRLGSWDRGMQYSHSIITNLLYHVVGWTDWNLALNPEGGPNWVRNFVDSPIIVDITKDTFYKQPMFYHLGHFSKFIPEGSQRVGLVASQKNDLDAVALLHPDGSAVVVVLNRSSKDVPWTIKDPAVGFLETISPGYSIHTYLWRRQ

SEQ ID NO: 347 - DNA, 1614 bp, synthetic construct
  misc_feature 1..1614: note = Variant of B-Glucocerebrosidase
  source 1..1614: mol_type = other DNA
atggagttttcttctcctagtagagaagaatgccccaagccactgagcagggtgagcatcatggctggatccctcacagggctgcttcttttgcaggcagtctcatgggcctctggagccaggccctgtattcccaagtcattcggctactcctcagtggtgtgtgtatgcaatgccacctattgtgacagtttcgatcctccaactctccctgctctgggtaccttctcccggtatgagagcacaagaagtggaagacgcatggagctctcaatgggccctatacaggctaaccacactgggacaggtctgctgctggatctccaacctgaacagaagtttcagaaagtcaagggatttggaggagccatgactgatgcagcagcactcaacatcttggccctgtctccaccagcccagaatctgctgttgaagtcctacttctcagaggaggggattggctacaacatcatccgggttcccatggctagctgtgacttctccattaggacctatacatacgctgacacccccgatgattttcagctccataatttcagtctccctgaagaagacaccaaactgaagatacctctgattcacagagccttgcaactgtcccaaaggccagtgagcctcttcgcttctccctggactagtcctacatggctgaagactaatggtgctgttaatgggaaaggctccctgaaaggacagccaggtgacatatatcatcagacatgggcccgctactttgtgaaattccttgatgcctatgcagagcacaagctccaattctgggcagtcaccgcagaaaacgagccctcagctgggctgctgtctggctacccctttcagtgcttgggctttactcctgagcatcaacgggacttcattgcccgggatttggggccaacactggccaacagcacccaccacaatgtaagactcctcatgctggatgaccagaggctgctgctccctcattgggccaaggtggtgttgacagacccagaagctgccaaatatgttcatggcatcgctgtccactggtacctggattttttggcccctgcaaaggctactctgggagagacccacagactcttccccaataccatgctgtttgcatcagaagcctgcgtggggagcaaattctgggagcagtctgttaggctgggttcctgggatcggggcatgcaatattcccatagtataataactaacctcctctaccacgtggtaggatggacagactggaatctggctttgaacccagaaggaggccccaattgggtgcgcaactttgttgacagccccatcattgtggatatcacaaaggacaccttctacaaacagcctatgttctatcatctggggcactttagcaagttcattccagagggttcccagagagtaggcttggttgcctcacagaagaatgatctggatgctgtggcactcctgcatcctgacgggagtgcagtggtggtagtactgaacaggtctagcaaagatgttcccttgactatcaaagacccagctgtgggctttctggaaaccatttcccctggatactctatccacacctatctctggagaagacagtaatga

SEQ ID NO: 348 - protein, 536 aa, synthetic construct
  REGION 1..536: note = Variant of B-Glucocerebrosidase
MEFSSPSREECPKPLSRVSIMAGSLTGLLLLQAVSWASGARPCIPKSFGYSSVVCVCNATYCDSFDPPTLPALGTFSRYESTRSGRRMELSMGPIQANHTGTGLLLDLQPEQKFQKVKGFGGAMTDAAALNILALSPPAQNLLLKSYFSEEGIGYNIIRVPMASCDFSIRTYTYADTPDDFQLHNFSLPEEDTKLKIPLIHRALQLSQRPVSLFASPWTSPTWLKTNGAVNGKGSLKGQPGDIYHQTWARYFVKFLDAYAEHKLQFWAVTAENEPSAGLLSGYPFQCLGFTPEHQRDFIARDLGPTLANSTHHNVRLLMLDDQRLLLPHWAKVVLTDPEAAKYVHGIAVHWYLDFLAPAKATLGETHRLFPNTMLFASEACVGSKFWEQSVRLGSWDRGMQYSHSIITNLLYHVVGWTDWNLALNPEGGPNWVRNFVDSPIIVDITKDTFYKQPMFYHLGHFSKFIPEGSQRVGLVASQKNDLDAVALLHPDGSAVVVVLNRSSKDVPLTIKDPAVGFLETISPGYSIHTYLWRRQ

SEQ ID NO: 349 - DNA, 1614 bp, synthetic construct
  misc_feature 1..1614: note = Variant of B-Glucocerebrosidase
  source 1..1614: mol_type = other DNA
atggagttttcttctcctagtagagaagaatgccccaagccactgagcagggtgagcatcatggctggatccctcacagggctgcttcttttgcaggcagtctcatgggcctctggagccaggccctgtattcccaagtcattcggctactcctcagtggtgtgtgtatgcaatgccacctattgtgacagtttcgatcctccaactctccctgctctgggtaccttctcccggtatgagagcacaagaagtggaagacgcatgtgtctctcaatgggccctatacaggctaaccacactgggacaggtctgctgctgaccctccaacctgaacagaagtttcagaaagtcaagggatttggaggagccatgactgatgcagcagcactcaacatcttggccctgtctccaccagcccagaatctgctgttgaagtcctacttctcagaggaggggattggctacaacatcatccgggttcccatggctagctgtgacttctccattaggacctatacatacgctgacacccccgatgattttcagctccataatttcagtctccctgaagaagacaccaaactgaagatacctctgattcacagagccttgcaactgtcccaaaggccagtgagcctcttcgcttctccctggactagtcctacatggctgaagactaatggtgctgttaatgggaaaggctccctgaaaggacagccaggtgacatatatcatcagacatgggcccgctactttgtgaaattccttgatgcctatgcagagcacaagctccaattctgggcagtcaccgcagaaaacgagccctcagctgggctgctgtctggctacccctttcagtgcttgggctttactcctgagcatcaacgggacttcattgcccgggatttggggccaacactggccaacagcacccaccacaatgtaagactcctcatgctggatgaccagaggctgctgctccctcattgggccaaggtggtgttgacagacccagaagctgccaaatatgttcatggcatcgctgtccactggtacctggattttttggcccctgcaaaggctactctgggagagacccacagactcttccccaataccatgctgtttgcatcagaagcctgcgtggggagcaaattctgggagcagtctgttaggctgggttcctgggatcggggcatgcaatattcccatagtataataactaacctcctctaccacgtggtaggatggacagactggaatctggctttgaacccagaaggaggccccaattgggtgcgcaactttgttgacagccccatcattgtggatatcacaaaggacaccttctacaaacagcctatgttctatcatctggggcactttagcaagttcattccagagggttcccagagagtaggcttggttgcctcacagaagaatgatctggatgctgtggcactcctgcatcctgacgggagtgcagtggtggtagtactgaacaggtctagcaaagatgttcccttgactatcaaagacccagctgtgggctttctggaaaccatttcccctggatactctatccacacctatctctggagaagacagtaatga

SEQ ID NO: 350 - protein, 536 aa, synthetic construct
  REGION 1..536: note = Variant of B-Glucocerebrosidase
MEFSSPSREECPKPLSRVSIMAGSLTGLLLLQAVSWASGARPCIPKSFGYSSVVCVCNATYCDSFDPPTLPALGTFSRYESTRSGRRMCLSMGPIQANHTGTGLLLTLQPEQKFQKVKGFGGAMTDAAALNILALSPPAQNLLLKSYFSEEGIGYNIIRVPMASCDFSIRTYTYADTPDDFQLHNFSLPEEDTKLKIPLIHRALQLSQRPVSLFASPWTSPTWLKTNGAVNGKGSLKGQPGDIYHQTWARYFVKFLDAYAEHKLQFWAVTAENEPSAGLLSGYPFQCLGFTPEHQRDFIARDLGPTLANSTHHNVRLLMLDDQRLLLPHWAKVVLTDPEAAKYVHGIAVHWYLDFLAPAKATLGETHRLFPNTMLFASEACVGSKFWEQSVRLGSWDRGMQYSHSIITNLLYHVVGWTDWNLALNPEGGPNWVRNFVDSPIIVDITKDTFYKQPMFYHLGHFSKFIPEGSQRVGLVASQKNDLDAVALLHPDGSAVVVVLNRSSKDVPLTIKDPAVGFLETISPGYSIHTYLWRRQ

SEQ ID NO: 351 - DNA, 1614 bp, synthetic construct
  misc_feature 1..1614: note = Variant of B-Glucocerebrosidase
  source 1..1614: mol_type = other DNA
atggagttttcttctcctagtagagaagaatgccccaagccactgagcagggtgagcatcatggctggatccctcacagggctgcttcttttgcaggcagtctcatgggcctctggagccaggccctgtattcccaagtcattcggctactcctcagtggtgtgtgtatgcaatgccacctattgtgacagtttcgatcctccaactctccctgctctgggtaccttctcccggtatgagagcacaagaagtggaagacgcatggagctctcaatgggccctatacaggctaaccacactgggacaggtctgctgctgaccctccaacctgaacagaagtttcagaaagtcaagggatttggaggagccatgactgatgcagcagcactcaacatcttggccctgtctccaccagcccagaatctgctgttgaagtcctacttctcagaggaggggattggctacaacatcatccgggttcccatggctagctgtgacttctccattaggacctatacatacgctgacacccccgatgattttcagctccataatttcagtctccctgaagaagacaccaaactgaagatacctctgattcacagagccttgcaactgtcccaaaggccagtgagcctcttcgcttctccctggactagtcctacatggctgaagactaatggtgctgttaatgggaaaggctccctgaaaggacagccaggtgacatatatcatcagacatgggcccgctactttgtgaaattccttgatgcctatcgggagcacaagctccaattctgggcagtcaccgcagaaaacgagccctcagctgggctgctgtctggctacccctttcagtgcttgggctttactcctgagcatcaacgggacttcattgcccgggatttggggccaacactggccaacagcacccaccacaatgtaagactcctcatgctggatgaccagaggctgctgctccctcattgggccaaggtggtgttgacagacccagaagctgccaaatatgttcatggcatcgctgtccactggtacctggattttttggcccctgcaaaggctactctgggagagacccacagactcttccccaataccatgctgtttgcatcagaagcctgcgtggggagcaaattctgggagcagtctgttaggctgggttcctgggatcggggcatgcaatattcccatagtataataactaacctcctctaccacgtggtaggatggacagactggaatctggctttgaacccagaaggaggccccaattgggtgcgcaactttgttgacagccccatcattgtggatatcacaaaggacaccttctacaaacagcctatgttctatcatctggggcactttagcaagttcattccagagggttcccagagagtaggcttggttgcctcacagaagaatgatctggatgctgtggcactcctgcatcctgacgggagtgcagtggtggtagtactgaacaggtctagcaaagatgttcccttgactatcaaagacccagctgtgggctttctggaaaccatttcccctggatactctatccacacctatctctggagaagacagtaatga

SEQ ID NO: 352 - protein, 536 aa, synthetic construct
  REGION 1..536: note = Variant of B-Glucocerebrosidase
MEFSSPSREECPKPLSRVSIMAGSLTGLLLLQAVSWASGARPCIPKSFGYSSVVCVCNATYCDSFDPPTLPALGTFSRYESTRSGRRMELSMGPIQANHTGTGLLLTLQPEQKFQKVKGFGGAMTDAAALNILALSPPAQNLLLKSYFSEEGIGYNIIRVPMASCDFSIRTYTYADTPDDFQLHNFSLPEEDTKLKIPLIHRALQLSQRPVSLFASPWTSPTWLKTNGAVNGKGSLKGQPGDIYHQTWARYFVKFLDAYREHKLQFWAVTAENEPSAGLLSGYPFQCLGFTPEHQRDFIARDLGPTLANSTHHNVRLLMLDDQRLLLPHWAKVVLTDPEAAKYVHGIAVHWYLDFLAPAKATLGETHRLFPNTMLFASEACVGSKFWEQSVRLGSWDRGMQYSHSIITNLLYHVVGWTDWNLALNPEGGPNWVRNFVDSPIIVDITKDTFYKQPMFYHLGHFSKFIPEGSQRVGLVASQKNDLDAVALLHPDGSAVVVVLNRSSKDVPLTIKDPAVGFLETISPGYSIHTYLWRRQ

SEQ ID NO: 353 - DNA, 1614 bp, synthetic construct
  misc_feature 1..1614: note = Variant of B-Glucocerebrosidase
  source 1..1614: mol_type = other DNA
atggagttttcttctcctagtagagaagaatgccccaagccactgagcagggtgagcatcatggctggatccctcacagggctgcttcttttgcaggcagtctcatgggcctctggagccaggccctgtattcccaagtcattcggctactcctcagtggtgtgtgtatgcaatgccacctattgtgacagtttcgatcctccaactctccctgctctgggtaccttctcccggtatgagagcacaagaagtggaagacgcatggagctctcaatgggccctatacaggctaaccacactgggacaggtctgctgctgaccctccaacaggaacagaagtttcagaaagtcaagggatttggaggagccatgactgatgcagcagcactcaacatcttggccctgtctccaccagcccagaatctgctgttgaagtcctacttctcagaggaggggattggctacaacatcatccgggttcccatggctagctgtgacttctccattaggacctatacatacgctgacacccccgatgattttcagctccataatttcagtctccctgaagaagacaccaaactgaagatacctctgattcacagagccttgcaactgtcccaaaggccagtgagcctcttcgcttctccctggactagtcctacatggctgaagactaatggtgctgttaatgggaaaggctccctgaaaggacagccaggtgacatatatcatcagacatgggcccgctactttgtgaaattccttgatgcctatgcagagcacaagctccaattctgggcagtcaccgcagaaaacgagccctcagctgggctgctgtctggctacccctttcagtgcttgggctttactcctgagcatcaacgggacttcattgcccgggatttggggccaacactggccaacagcacccaccacaatgtaagactcctcatgctggatgaccagaggctgctgctccctcattgggccaaggtggtgttgacagacccagaagctgccaaatatgttcatggcatcgctgtccactggtacctggattttttggcccctgcaaaggctactctgggagagacccacagactcttccccaataccatgctgtttgcatcagaagcctgcgtggggagcaaattctgggagcagtctgttaggctgggttcctgggatcggggcatgcaatattcccatagtataataactaacctcctctaccacgtggtaggatggacagactggaatctggctttgaacccagaaggaggccccaattgggtgcgcaactttgttgacagccccatcattgtggatatcacaaaggacaccttctacaaacagcctatgttctatcatctggggcactttagcaagttcattccagagggttcccagagagtaggcttggttgcctcacagaagaatgatctggatgctgtggcactcctgcatcctgacgggagtgcagtggtggtagtactgaacaggtctagcaaagatgttcccttgactatcaaagacccagctgtgggctttctggaaaccatttcccctggatactctatccacacctatctctggagaagacagtaatga

SEQ ID NO: 354 - protein, 536 aa, synthetic construct
  REGION 1..536: note = Variant of B-Glucocerebrosidase
MEFSSPSREECPKPLSRVSIMAGSLTGLLLLQAVSWASGARPCIPKSFGYSSVVCVCNATYCDSFDPPTLPALGTFSRYESTRSGRRMELSMGPIQANHTGTGLLLTLQQEQKFQKVKGFGGAMTDAAALNILALSPPAQNLLLKSYFSEEGIGYNIIRVPMASCDFSIRTYTYADTPDDFQLHNFSLPEEDTKLKIPLIHRALQLSQRPVSLFASPWTSPTWLKTNGAVNGKGSLKGQPGDIYHQTWARYFVKFLDAYAEHKLQFWAVTAENEPSAGLLSGYPFQCLGFTPEHQRDFIARDLGPTLANSTHHNVRLLMLDDQRLLLPHWAKVVLTDPEAAKYVHGIAVHWYLDFLAPAKATLGETHRLFPNTMLFASEACVGSKFWEQSVRLGSWDRGMQYSHSIITNLLYHVVGWTDWNLALNPEGGPNWVRNFVDSPIIVDITKDTFYKQPMFYHLGHFSKFIPEGSQRVGLVASQKNDLDAVALLHPDGSAVVVVLNRSSKDVPLTIKDPAVGFLETISPGYSIHTYLWRRQ

SEQ ID NO: 355 - DNA, 1614 bp, synthetic construct
  misc_feature 1..1614: note = Variant of B-Glucocerebrosidase
  source 1..1614: mol_type = other DNA
atggagttttcttctcctagtagagaagaatgccccaagccactgagcagggtgagcatcatggctggatccctcacagggctgcttcttttgcaggcagtctcatgggcctctggagccaggccctgtattcccaagtcattcggctactcctcagtggtgtgtgtatgcaatgccacctattgtgacagtttcgatcctccaactctccctgctctgggtaccttctcccggtatgagagcacaagaagtggaagacgcatggagctctcaatgggccctatacaggctaaccacactgggacaggtctgctgctgaccctccaacctgaacagaagtttcagaaagtcaagggatttggaggagccatgactgatgcagcagcactcaacatcttggccctgtctccaccagcccagaatctgctgttgaagtcctacttctcagaggaggggattggctacaacatcatccgggttcccatggctagctgtgacttctccattaggacctatacatacgctgacacccccgatgattttcagctccataatgggagtctccctgaagaagacaccaaactgaagatacctctgattcacagagccttgcaactgtcccaaaggccagtgagcctcttcgcttctccctggactagtcctacatggctgaagactaatggtgctgttaatgggaaaggctccctgaaaggacagccaggtgacatatatcatcagacatgggcccgctactttgtgaaattccttgatgcctatgcagagcacaagctccaattctgggcagtcaccgcagaaaacgagccctcagctgggctgctgtctggctacccctttcagtgcttgggctttactcctgagcatcaacgggacttcattgcccgggatttggggccaacactggccaacagcacccaccacaatgtaagactcctcatgctggatgaccagaggctgctgctccctcattgggccaaggtggtgttgacagacccagaagctgccaaatatgttcatggcatcgctgtccactggtacctggattttttggcccctgcaaaggctactctgggagagacccacagactcttccccaataccatgctgtttgcatcagaagcctgcgtggggagcaaattctgggagcagtctgttaggctgggttcctgggatcggggcatgcaatattcccatagtataataactaacctcctctaccacgtggtaggatggacagactggaatctggctttgaacccagaaggaggccccaattgggtgcgcaactttgttgacagccccatcattgtggatatcacaaaggacaccttctacaaacagcctatgttctatcatctggggcactttagcaagttcattccagagggttcccagagagtaggcttggttgcctcacagaagaatgatctggatgctgtggcactcctgcatcctgacgggagtgcagtggtggtagtactgaacaggtctagcaaagatgttcccttgactatcaaagacccagctgtgggctttctggaaaccatttcccctggatactctatccacacctatctctggagaagacagtaatga

SEQ ID NO: 356 - protein, 536 aa, synthetic construct
  REGION 1..536: note = Variant of B-Glucocerebrosidase
MEFSSPSREECPKPLSRVSIMAGSLTGLLLLQAVSWASGARPCIPKSFGYSSVVCVCNATYCDSFDPPTLPALGTFSRYESTRSGRRMELSMGPIQANHTGTGLLLTLQPEQKFQKVKGFGGAMTDAAALNILALSPPAQNLLLKSYFSEEGIGYNIIRVPMASCDFSIRTYTYADTPDDFQLHNGSLPEEDTKLKIPLIHRALQLSQRPVSLFASPWTSPTWLKTNGAVNGKGSLKGQPGDIYHQTWARYFVKFLDAYAEHKLQFWAVTAENEPSAGLLSGYPFQCLGFTPEHQRDFIARDLGPTLANSTHHNVRLLMLDDQRLLLPHWAKVVLTDPEAAKYVHGIAVHWYLDFLAPAKATLGETHRLFPNTMLFASEACVGSKFWEQSVRLGSWDRGMQYSHSIITNLLYHVVGWTDWNLALNPEGGPNWVRNFVDSPIIVDITKDTFYKQPMFYHLGHFSKFIPEGSQRVGLVASQKNDLDAVALLHPDGSAVVVVLNRSSKDVPLTIKDPAVGFLETISPGYSIHTYLWRRQ

SEQ ID NO: 357 - DNA, 1614 bp, synthetic construct
  misc_feature 1..1614: note = Variant of B-Glucocerebrosidase
  source 1..1614: mol_type = other DNA
atggagttttcttctcctagtagagaagaatgccccaagccactgagcagggtgagcatcatggctggatccctcacagggctgcttcttttgcaggcagtctcatgggcctctggagccaggccctgtattcccaagtcattcggctactcctcagtggtgtgtgtatgcaatgccacctattgtgacagtttcgatcctccaactctccctgctctgggtaccttctcccggtatgagagcacaagaagtggaagacgcatggagctctcaatgggccctatacaggctaaccacactgggacaggtctgctgctgaccctccaacctgaacagaagtttcagaaagtcaagggatttggaggagccatgactgatgcagcagcactcaacatcttggccctgtctccaccagcccagaatctgctgttgaagtcctacttctcagaggaggggattggctacaacatcatccgggttcccatggctagctgtgacttctccattaggacctatacatacgctgacacccccgatgattttcagctccataatttcagtctccctgaagaagacaccaaactgaagatacctctgattcacagagccttgcaactgtcccaaaggccagtgagcctcttcgcttctccctggactagtcctacatggctgaagactaatggtgctgttaatgggaaaggctccctgaaaggacagccaggtgacatatatcatcagacatgggcccgctactttgtgaaattccttgatgcctatgcagagcacaagctccaattctgggcagtcaccgcagaaaacgagccctcagctgggctgctgtctggctacccctttcagtgcttgggctttactcctgagcatcaacgggacttcattgcccgggatttggggccaacactggccaacagcacccaccacaatgtaagactcctcatgctggatgaccagaggctgctgctccctcattgggccaaggtggtgttgacagacccagaagctgccaaatatgttcatggcatcgctgtccactggtacctggattttttggcccctgcaaaggctactctgggagagacccacagactccggcccaataccatgctgtttgcatcagaagcctgcgtggggagcaaattctgggagcagtctgttaggctgggttcctgggatcggggcatgcaatattcccatagtataataactaacctcctctaccacgtggtaggatggacagactggaatctggctttgaacccagaaggaggccccaattgggtgcgcaactttgttgacagccccatcattgtggatatcacaaaggacaccttctacaaacagcctatgttctatcatctggggcactttagcaagttcattccagagggttcccagagagtaggcttggttgcctcacagaagaatgatctggatgctgtggcactcctgcatcctgacgggagtgcagtggtggtagtactgaacaggtctagcaaagatgttcccttgactatcaaagacccagctgtgggctttctggaaaccatttcccctggatactctatccacacctatctctggagaagacagtaatga

SEQ ID NO: 358 - protein, 536 aa, synthetic construct
  REGION 1..536: note = Variant of B-Glucocerebrosidase
MEFSSPSREECPKPLSRVSIMAGSLTGLLLLQAVSWASGARPCIPKSFGYSSVVCVCNATYCDSFDPPTLPALGTFSRYESTRSGRRMELSMGPIQANHTGTGLLLTLQPEQKFQKVKGFGGAMTDAAALNILALSPPAQNLLLKSYFSEEGIGYNIIRVPMASCDFSIRTYTYADTPDDFQLHNFSLPEEDTKLKIPLIHRALQLSQRPVSLFASPWTSPTWLKTNGAVNGKGSLKGQPGDIYHQTWARYFVKFLDAYAEHKLQFWAVTAENEPSAGLLSGYPFQCLGFTPEHQRDFIARDLGPTLANSTHHNVRLLMLDDQRLLLPHWAKVVLTDPEAAKYVHGIAVHWYLDFLAPAKATLGETHRLRPNTMLFASEACVGSKFWEQSVRLGSWDRGMQYSHSIITNLLYHVVGWTDWNLALNPEGGPNWVRNFVDSPIIVDITKDTFYKQPMFYHLGHFSKFIPEGSQRVGLVASQKNDLDAVALLHPDGSAVVVVLNRSSKDVPLTIKDPAVGFLETISPGYSIHTYLWRRQ

SEQ ID NO: 359 - DNA, 1614 bp, synthetic construct
  misc_feature 1..1614: note = Variant of B-Glucocerebrosidase
  source 1..1614: mol_type = other DNA
atggagttttcttctcctagtagagaagaatgccccaagccactgagcagggtgagcatcatggctggatccctcacagggctgcttcttttgcaggcagtctcatgggcctctggagccaggccctgtattcccaagtcattcggctactcctcagtggtgtgtgtatgcaatgccacctattgtgacagtttcgatcctccaactctccctgctctgggtaccttctcccggtatgagagcacaagaagtggaagacgcatggagctctcaatgggccctatacaggctaaccacactgggacaggtctgctgctgaccctccaacctgaacagaagtttcagaaagtcaagggatttggaggagccatgactgatgcagcagcactcaacatcttggccctgtctccaccagcccagaatctgctgttgaagtcctacttctcagaggaggggattggctacaacatcatccgggttcccatggctagctgtgacttctccattaggacctatacatacgctgacacccccgatgattttcagctccataatttcagtctccctgaagaagacaccaaactgaagatacctctgattcacagagccttgcaactgtcccaaaggccagtgagcctcttcgcttctccctggactagtcctacatggctgaagactaatggtgctgttaatgggaaaggctccctgaaaggacagccaggtgacatatatcatcagacatgggcccgctactttgtgaaattccttgatgcctatgcagagcacaagctccaattctgggcagtcaccgcagaaaacgagccctcagctgggctgctgtctggctacccctttcagtgcttgggctttactcctgagcatcaacgggacttcattgcccgggatttggggccaacactggccaacagcacccaccacaatgtaagactcctcatgctggatgaccagaggctgctgctccctcattgggccaaggtggtgttgacagacccagaagctgccaaatatgttcatggcatcgctgtccactggtacctggattttttggcccctgcaaaggctactctgggagagacccacagactcttccccaataccatgctgtttgcatcagaagcctgcgtggggagcaaattctgggagcagtctgttaggctgggttcctgggatcggggcatgcaatattcccatagtataataactaacctcctctaccacgtggtaggatggacagactggaatctggctttgaacccagaaggaggccccaattgggtgcgcaactttgttgacagccccatcattgtggatatcacaaaggacaccttctacaaacagcctatgttctatcatctggggcactttagcaagttcattccagagggttcccagagagtaggcttggttgcctcacagaagaatgatctggatgctgtggcactcctgcatcctgacgggagtgcagtggtggtagtactgaacaggtctagcaaagatgttccccggactatcaaagacccagctgtgggctttctggaaaccatttcccctggatactctatccacacctatctctggagaagacagtaatga

SEQ ID NO: 360 - protein, 536 aa, synthetic construct
  REGION 1..536: note = Variant of B-Glucocerebrosidase
MEFSSPSREECPKPLSRVSIMAGSLTGLLLLQAVSWASGARPCIPKSFGYSSVVCVCNATYCDSFDPPTLPALGTFSRYESTRSGRRMELSMGPIQANHTGTGLLLTLQPEQKFQKVKGFGGAMTDAAALNILALSPPAQNLLLKSYFSEEGIGYNIIRVPMASCDFSIRTYTYADTPDDFQLHNFSLPEEDTKLKIPLIHRALQLSQRPVSLFASPWTSPTWLKTNGAVNGKGSLKGQPGDIYHQTWARYFVKFLDAYAEHKLQFWAVTAENEPSAGLLSGYPFQCLGFTPEHQRDFIARDLGPTLANSTHHNVRLLMLDDQRLLLPHWAKVVLTDPEAAKYVHGIAVHWYLDFLAPAKATLGETHRLFPNTMLFASEACVGSKFWEQSVRLGSWDRGMQYSHSIITNLLYHVVGWTDWNLALNPEGGPNWVRNFVDSPIIVDITKDTFYKQPMFYHLGHFSKFIPEGSQRVGLVASQKNDLDAVALLHPDGSAVVVVLNRSSKDVPRTIKDPAVGFLETISPGYSIHTYLWRRQ

SEQ ID NO: 361 - DNA, 1614 bp, synthetic construct
  misc_feature 1..1614: note = Variant of B-Glucocerebrosidase
  source 1..1614: mol_type = other DNA
atggagttttcttctcctagtagagaagaatgccccaagccactgagcagggtgagcatcatggctggatccctcacagggctgcttcttttgcaggcagtctcatgggcctctggagccaggccctgtattcccaagtcattcggctactcctcagtggtgtgtgtatgcaatgccacctattgtgacagtttcgatcctccaactctccctgctctgggtaccttctcccggtatgagagcacaagaagtggaagacgcatggagctctcaatgggccctatacaggctaaccacactgggacaggtctgctgctgaccctccaacctgaacagaagtttcagaaagtcaagggatttggaggagccatgactgatgcagcagcactcaacatcttggccctgtctccaccagcccagaatctgctgttgaagtcctacttctcagaggaggggattggctacaacatcatccgggttcccatggctagctgtgacttctccattaggacctatacatacgctgacacccccgatgattttcagctccataatttcagtctccctgaaagggacaccaaactgaagatacctctgattcacagagccttgcaactgtcccaaaggccagtgagcctcttcgcttctccctggactagtcctacatggctgaagactaatggtgctgttaatgggaaaggctccctgaaaggacagccaggtgacatatatcatcagacatgggcccgctactttgtgaaattccttgatgcctatgcagagcacaagctccaattctgggcagtcaccgcagaaaacgagccctcagctgggctgctgtctggctacccctttcagtgcttgggctttactcctgagcatcaacgggacttcattgcccgggatttggggccaacactggccaacagcacccaccacaatgtaagactcctcatgctggatgaccagaggctgctgctccctcattgggccaaggtggtgttgacagacccagaagctgccaaatatgttcatggcatcgctgtccactggtacctggattttttggcccctgcaaaggctactctgggagagacccacagactcttccccaataccatgctgtttgcatcagaagcctgcgtggggagcaaattctgggagcagtctgttaggctgggttcctgggatcggggcatgcaatattcccatagtataataactaacctcctctaccacgtggtaggatggacagactggaatctggctttgaacccagaaggaggccccaattgggtgcgcaactttgttgacagccccatcattgtggatatcacaaaggacaccttctacaaacagcctatgttctatcatctggggcactttagcaagttcattccagagggttcccagagagtaggcttggttgcctcacagaagaatgatctggatgctgtggcactcctgcatcctgacgggagtgcagtggtggtagtactgaacaggtctagcaaagatgttcccttgactatcaaagacccagctgtgggctttctggaaaccatttcccctggatactctatccacacctatctctggagaagacagtaatga

SEQ ID NO: 362 - protein, 536 aa, synthetic construct
  REGION 1..536: note = Variant of B-Glucocerebrosidase
MEFSSPSREECPKPLSRVSIMAGSLTGLLLLQAVSWASGARPCIPKSFGYSSVVCVCNATYCDSFDPPTLPALGTFSRYESTRSGRRMELSMGPIQANHTGTGLLLTLQPEQKFQKVKGFGGAMTDAAALNILALSPPAQNLLLKSYFSEEGIGYNIIRVPMASCDFSIRTYTYADTPDDFQLHNFSLPERDTKLKIPLIHRALQLSQRPVSLFASPWTSPTWLKTNGAVNGKGSLKGQPGDIYHQTWARYFVKFLDAYAEHKLQFWAVTAENEPSAGLLSGYPFQCLGFTPEHQRDFIARDLGPTLANSTHHNVRLLMLDDQRLLLPHWAKVVLTDPEAAKYVHGIAVHWYLDFLAPAKATLGETHRLFPNTMLFASEACVGSKFWEQSVRLGSWDRGMQYSHSIITNLLYHVVGWTDWNLALNPEGGPNWVRNFVDSPIIVDITKDTFYKQPMFYHLGHFSKFIPEGSQRVGLVASQKNDLDAVALLHPDGSAVVVVLNRSSKDVPLTIKDPAVGFLETISPGYSIHTYLWRRQ

SEQ ID NO: 363 - DNA, 1614 bp, synthetic construct
  misc_feature 1..1614: note = Variant of B-Glucocerebrosidase
  source 1..1614: mol_type = other DNA
atggagttttcttctcctagtagagaagaatgccccaagccactgagcagggtgagcatcatggctggatccctcacagggctgcttcttttgcaggcagtctcatgggcctctggagccaggccctgtattcccaagtcattcggctactcctcagtggtgtgtgtatgcaatgccacctattgtgacagtttcgatcctccaactctccctgctctgggtaccttctcccggtatgagagcacaagaagtggaagacgcatggagctctcaatgggccctatacaggctaaccacactgggacaggtctgctgctgaccctccaacctgaacagaagtttcagaaagtcaagggatttggaggagccatgactgatgcagcagcactcaacatcttggccctgtctccaccagcccagaatctgctgttgaagtcctacttctcagaggaggggattggctacaacatcatccgggttcccatggctagctgtgacttctccattaggacctatacatacgctgacacccccgatgattttcagctccataatttcagtctccctgaagaagacaccaaactgaagatacctctgattcacagagccttgcaactgtcccaaaggccagtgagcctcttcgcttctccctggactagtcctacatggctgaagactaatggtgctgttaatgggaaaggctccctgaaaggacagccaggtgacatatatcatcagacatgggcccgctactttgtgaaattccttgatgcctatgcagagcacaagctccaattctgggcagtcaccgcagaaaacgagccctcagctgggctgctgtctggctacccctttcagtgcttgggctttactcctgagcatcaacgggacttcattgcccgggatttggggccaacactggccaacagcacccaccacaatgtaagactcctcatgctggatgaccagaggctgctgctccctcattgggccaagttggtgttgacagacccagaagctgccaaatatgttcatggcatcgctgtccactggtacctggattttttggcccctgcaaaggctactctgggagagacccacagactcttccccaataccatgctgtttgcatcagaagcctgcgtggggagcaaattctgggagcagtctgttaggctgggttcctgggatcggggcatgcaatattcccatagtataataactaacctcctctaccacgtggtaggatggacagactggaatctggctttgaacccagaaggaggccccaattgggtgcgcaactttgttgacagccccatcattgtggatatcacaaaggacaccttctacaaacagcctatgttctatcatctggggcactttagcaagttcattccagagggttcccagagagtaggcttggttgcctcacagaagaatgatctggatgctgtggcactcctgcatcctgacgggagtgcagtggtggtagtactgaacaggtctagcaaagatgttcccttgactatcaaagacccagctgtgggctttctggaaaccatttcccctggatactctatccacacctatctctggagaagacagtaatga

SEQ ID NO: 364 - protein, 536 aa, synthetic construct
  REGION 1..536: note = Variant of B-Glucocerebrosidase
MEFSSPSREECPKPLSRVSIMAGSLTGLLLLQAVSWASGARPCIPKSFGYSSVVCVCNATYCDSFDPPTLPALGTFSRYESTRSGRRMELSMGPIQANHTGTGLLLTLQPEQKFQKVKGFGGAMTDAAALNILALSPPAQNLLLKSYFSEEGIGYNIIRVPMASCDFSIRTYTYADTPDDFQLHNFSLPEEDTKLKIPLIHRALQLSQRPVSLFASPWTSPTWLKTNGAVNGKGSLKGQPGDIYHQTWARYFVKFLDAYAEHKLQFWAVTAENEPSAGLLSGYPFQCLGFTPEHQRDFIARDLGPTLANSTHHNVRLLMLDDQRLLLPHWAKLVLTDPEAAKYVHGIAVHWYLDFLAPAKATLGETHRLFPNTMLFASEACVGSKFWEQSVRLGSWDRGMQYSHSIITNLLYHVVGWTDWNLALNPEGGPNWVRNFVDSPIIVDITKDTFYKQPMFYHLGHFSKFIPEGSQRVGLVASQKNDLDAVALLHPDGSAVVVVLNRSSKDVPLTIKDPAVGFLETISPGYSIHTYLWRRQ

SEQ ID NO: 365 - DNA, 1614 bp, synthetic construct
  misc_feature 1..1614: note = Variant of B-Glucocerebrosidase
  source 1..1614: mol_type = other DNA
atggagttttcttctcctagtagagaagaatgccccaagccactgagcagggtgagcatcatggctggatccctcacagggctgcttcttttgcaggcagtctcatgggcctctggagccaggccctgtattcccaagtcattcggctactcctcagtggtgtgtgtatgcaatgccacctattgtgacagtttcgatcctccaactctccctgctctgggtaccttctcccggtatgagagcacaagaagtggaagacgcatggagctctcaatgggccctatacaggctaaccacactgggacaggtctgctgctgaccctccaacctgaacagaagtttcagaaagtcaagggatttggaggagccatgactgatgcagcagcactcaacatcttggccctgtctccaccagcccagaatctgctgttgaagtcctacttctcagaggaggggattggctacaacatcatccgggttcccatggctagctgtgacttctccattaggacctatacatacgctgacacccccgatgattttcagctccataatttcagtctccgggaagaagacaccaaactgaagatacctctgattcacagagccttgcaactgtcccaaaggccagtgagcctcttcgcttctccctggactagtcctacatggctgaagactaatggtgctgttaatgggaaaggctccctgaaaggacagccaggtgacatatatcatcagacatgggcccgctactttgtgaaattccttgatgcctatgcagagcacaagctccaattctgggcagtcaccgcagaaaacgagccctcagctgggctgctgtctggctacccctttcagtgcttgggctttactcctgagcatcaacgggacttcattgcccgggatttggggccaacactggccaacagcacccaccacaatgtaagactcctcatgctggatgaccagaggctgctgctccctcattgggccaaggtggtgttgacagacccagaagctgccaaatatgttcatggcatcgctgtccactggtacctggattttttggcccctgcaaaggctactctgggagagacccacagactcttccccaataccatgctgtttgcatcagaagcctgcgtggggagcaaattctgggagcagtctgttaggctgggttcctgggatcggggcatgcaatattcccatagtataataactaacctcctctaccacgtggtaggatggacagactggaatctggctttgaacccagaaggaggccccaattgggtgcgcaactttgttgacagccccatcattgtggatatcacaaaggacaccttctacaaacagcctatgttctatcatctggggcactttagcaagttcattccagagggttcccagagagtaggcttggttgcctcacagaagaatgatctggatgctgtggcactcctgcatcctgacgggagtgcagtggtggtagtactgaacaggtctagcaaagatgttcccttgactatcaaagacccagctgtgggctttctggaaaccatttcccctggatactctatccacacctatctctggagaagacagtaatga

SEQ ID NO: 366 - protein, 536 aa, synthetic construct
  REGION 1..536: note = Variant of B-Glucocerebrosidase
MEFSSPSREECPKPLSRVSIMAGSLTGLLLLQAVSWASGARPCIPKSFGYSSVVCVCNATYCDSFDPPTLPALGTFSRYESTRSGRRMELSMGPIQANHTGTGLLLTLQPEQKFQKVKGFGGAMTDAAALNILALSPPAQNLLLKSYFSEEGIGYNIIRVPMASCDFSIRTYTYADTPDDFQLHNFSLREEDTKLKIPLIHRALQLSQRPVSLFASPWTSPTWLKTNGAVNGKGSLKGQPGDIYHQTWARYFVKFLDAYAEHKLQFWAVTAENEPSAGLLSGYPFQCLGFTPEHQRDFIARDLGPTLANSTHHNVRLLMLDDQRLLLPHWAKVVLTDPEAAKYVHGIAVHWYLDFLAPAKATLGETHRLFPNTMLFASEACVGSKFWEQSVRLGSWDRGMQYSHSIITNLLYHVVGWTDWNLALNPEGGPNWVRNFVDSPIIVDITKDTFYKQPMFYHLGHFSKFIPEGSQRVGLVASQKNDLDAVALLHPDGSAVVVVLNRSSKDVPLTIKDPAVGFLETISPGYSIHTYLWRRQ

SEQ ID NO: 367 - DNA, 1614 bp, synthetic construct
  misc_feature 1..1614: note = Variant of B-Glucocerebrosidase
  source 1..1614: mol_type = other DNA
atggagttttcttctcctagtagagaagaatgccccaagccactgagcagggtgagcatcatggctggatccctcacagggctgcttcttttgcaggcagtctcatgggcctctggagccaggccctgtattcccaagtcattcggctactcctcagtggtgtgtgtatgcaatgccacctattgtgacagtttcgatcctccaactctccctgctctgggtaccttctcccggtatgagagcacaagaagtggaagacgcatggagctctcaatgggccctatacaggctaaccacactgggacaggtctgctgctgaccctccaacctgaacagaagtttcagaaagtcaagggatttggaggagccatgactgatgcagcagcactcaacatcttggccctgtctccaccagcccagaatctgctgttgaagtcctacttctcagaggaggggattggctacaacatcatccgggttcccatggctagctgtgacttctccattaggacctatacatacgctgacacccccgatgattttcagctccataatttcagtctccctgaagaagacaccaaactgaagatacctctgattcacagagccttgcaactgtcccaaaggccagtgagcctcttcgcttctccctggactagtcctacatggctgaagactaatggtgctgttaatgggaaaggctccctgaaaggacagccaggtgacatatatcatcagacatgggcccgctactttgtgaaattccttgatgcctatgcagagcacaagctccaattctgggcagtcaccgcagaaaacgagccctcagctgggctgctgtctggctacccctttcagtgcttgggctttactcctgagcatcaacgggacttcattgcccgggatttggggccaacactggccaacagcacccaccacaatgtaagactcctcatgctggatgaccagaggctgctgctccctcattgggccaaggtggtgttgacagacccagaagctgccaaatatgttcatggcatcgctgtccactggtacctggattttttggcccctgcaaaggctactctgggagagacccacagactcttccccaataccatgctgtttgcatcagaagcctgcgtggggagcaaattctgggagcagtctgttaggctgggttcctgggatcggggcatgcaatattcccatagtataataactaacctcctctaccacgtggtaggatggacagactggaatctggctttgaacccagaaggaggccccaattgggtgcgcaactttgttgacagccccatcattgtggatatcacaaaggacaccttctacaaacagcctatgttctatcatctggggcactttagcaagttcattccagggggttcccagagagtaggcttggttgcctcacagaagaatgatctggatgctgtggcactcctgcatcctgacgggagtgcagtggtggtagtactgaacaggtctagcaaagatgttcccttgactatcaaagacccagctgtgggctttctggaaaccatttcccctggatactctatccacacctatctctggagaagacagtaatga

SEQ ID NO: 368 - protein, 536 aa, synthetic construct
  REGION 1..536: note = Variant of B-Glucocerebrosidase
MEFSSPSREECPKPLSRVSIMAGSLTGLLLLQAVSWASGARPCIPKSFGYSSVVCVCNATYCDSFDPPTLPALGTFSRYESTRSGRRMELSMGPIQANHTGTGLLLTLQPEQKFQKVKGFGGAMTDAAALNILALSPPAQNLLLKSYFSEEGIGYNIIRVPMASCDFSIRTYTYADTPDDFQLHNFSLPEEDTKLKIPLIHRALQLSQRPVSLFASPWTSPTWLKTNGAVNGKGSLKGQPGDIYHQTWARYFVKFLDAYAEHKLQFWAVTAENEPSAGLLSGYPFQCLGFTPEHQRDFIARDLGPTLANSTHHNVRLLMLDDQRLLLPHWAKVVLTDPEAAKYVHGIAVHWYLDFLAPAKATLGETHRLFPNTMLFASEACVGSKFWEQSVRLGSWDRGMQYSHSIITNLLYHVVGWTDWNLALNPEGGPNWVRNFVDSPIIVDITKDTFYKQPMFYHLGHFSKFIPGGSQRVGLVASQKNDLDAVALLHPDGSAVVVVLNRSSKDVPLTIKDPAVGFLETISPGYSIHTYLWRRQ

SEQ ID NO: 369 - DNA, 1614 bp, synthetic construct
  misc_feature 1..1614: note = Variant of B-Glucocerebrosidase
  source 1..1614: mol_type = other DNA
atggagttttcttctcctagtagagaagaatgccccaagccactgagcagggtgagcatcatggctggatccctcacagggctgcttcttttgcaggcagtctcatgggcctctggagccaggccctgtattcccaagtcattcggctactcctcagtggtgtgtgtatgcaatgccacctattgtgacagtttcgatcctccaactctccctgctctgggtaccttctcccggtatgagagcacaagaagtggaagacgcatggagctctcaatgggccctatacaggctaaccacactgggacaggtctgctgctgaccctccaacctgaacagaagtttcagaaagtcaagggatttggaggagccatgactgatgcagcagcactcaacatcttggccctgtctccaccagcccagaatctgctgttgaagtcctacttctcagaggaggggattggctacaacatcatccgggttcccatggctagctgtgacttctccattaggacctatacatacgctgacacccccgatgattttcagctccataatttcagtctccctgaagaagacaccaaactgaagatacctctgattcacagagccttgcaactgtcccaaaggccagtgagcctcttcgcttctccctggactagtcctacatggctgaagactaatggtgctgttaatgggaaaggctccctgaaaggacagccaggtgacatatatcatcagacatgggcccgctactttgtgaaattccttgatgcctatgcagagcacaagctccaattctgggcagtcaccgcagaaaacgagccctcagctgggctgctgtctggctacccctttcagtgcttgggctttactcctgagcatcaacgggacttcattgcccgggatttggggccaacactggccaacagcacccaccacaatgtaagactcctcatgctggatgaccagaggctgctgctccctcattgggccaaggtggtgttgacagacccagaagctgccaaatatgttcatggcatcgctgtccactggtacctggattttttggcccctgcaaaggctactctgggagagacccacagactcttccccaataccatgctgtttgcatcagaagcctgcgtggggagcaaattctgggagcagtctgttaggctgggttcctgggatcggggcatgcaatattcccatagtataataactaacctcctctaccacgtggtaggatggacagactggaatctggctttgaacccagaaggaggccccaattgggtgcgcaactttgttgacagccccatcattgtggatatcacaaaggacaccttctacaaacagcctatgttctatcatctggggcactttagcaagttcattccagagggttcccagagaattggcttggttgcctcacagaagaatgatctggatgctgtggcactcctgcatcctgacgggagtgcagtggtggtagtactgaacaggtctagcaaagatgttcccttgactatcaaagacccagctgtgggctttctggaaaccatttcccctggatactctatccacacctatctctggagaagacagtaatga

SEQ ID NO: 370 - protein, 536 aa, synthetic construct
  REGION 1..536: note = Variant of B-Glucocerebrosidase
MEFSSPSREECPKPLSRVSIMAGSLTGLLLLQAVSWASGARPCIPKSFGYSSVVCVCNATYCDSFDPPTLPALGTFSRYESTRSGRRMELSMGPIQANHTGTGLLLTLQPEQKFQKVKGFGGAMTDAAALNILALSPPAQNLLLKSYFSEEGIGYNIIRVPMASCDFSIRTYTYADTPDDFQLHNFSLPEEDTKLKIPLIHRALQLSQRPVSLFASPWTSPTWLKTNGAVNGKGSLKGQPGDIYHQTWARYFVKFLDAYAEHKLQFWAVTAENEPSAGLLSGYPFQCLGFTPEHQRDFIARDLGPTLANSTHHNVRLLMLDDQRLLLPHWAKVVLTDPEAAKYVHGIAVHWYLDFLAPAKATLGETHRLFPNTMLFASEACVGSKFWEQSVRLGSWDRGMQYSHSIITNLLYHVVGWTDWNLALNPEGGPNWVRNFVDSPIIVDITKDTFYKQPMFYHLGHFSKFIPEGSQRIGLVASQKNDLDAVALLHPDGSAVVVVLNRSSKDVPLTIKDPAVGFLETISPGYSIHTYLWRRQ

SEQ ID NO: 371 - DNA, 1614 bp, synthetic construct
  misc_feature 1..1614: note = Variant of B-Glucocerebrosidase
  source 1..1614: mol_type = other DNA
atggagttttcttctcctagtagagaagaatgccccaagccactgagcagggtgagcatcatggctggatccctcacagggctgcttcttttgcaggcagtctcatgggcctctggagccaggccctgtattcccaagtcattcggctactcctcagtggtgtgtgtatgcaatgccacctattgtgacagtttcgatcctccaactctccctgctctgggtaccttctcccggtatgagagcacaagaagtggaagacgcatggagctctcaatgggccctatacaggctaaccacactgggacaggtctgctgctgaccctccaacctgaacagaagtttatgaaagtcaagggatttggaggagccatgactgatgcagcagcactcaacatcttggccctgtctccaccagcccagaatctgctgttgaagtcctacttctcagaggaggggattggctacaacatcatccgggttcccatggctagctgtgacttctccattaggacctatacatacgctgacacccccgatgattttcagctccataatttcagtctccctgaagaagacaccaaactgaagatacctctgattcacagagccttgcaactgtcccaaaggccagtgagcctcttcgcttctccctggactagtcctacatggctgaagactaatggtgctgttaatgggaaaggctccctgaaaggacagccaggtgacatatatcatcagacatgggcccgctactttgtgaaattccttgatgcctatgcagagcacaagctccaattctgggcagtcaccgcagaaaacgagccctcagctgggctgctgtctggctacccctttcagtgcttgggctttactcctgagcatcaacgggacttcattgcccgggatttggggccaacactggccaacagcacccaccacaatgtaagactcctcatgctggatgaccagaggctgctgctccctcattgggccaaggtggtgttgacagacccagaagctgccaaatatgttcatggcatcgctgtccactggtacctggattttttggcccctgcaaaggctactctgggagagacccacagactcttccccaataccatgctgtttgcatcagaagcctgcgtggggagcaaattctgggagcagtctgttaggctgggttcctgggatcggggcatgcaatattcccatagtataataactaacctcctctaccacgtggtaggatggacagactggaatctggctttgaacccagaaggaggccccaattgggtgcgcaactttgttgacagccccatcattgtggatatcacaaaggacaccttctacaaacagcctatgttctatcatctggggcactttagcaagttcattccagagggttcccagagagtaggcttggttgcctcacagaagaatgatctggatgctgtggcactcctgcatcctgacgggagtgcagtggtggtagtactgaacaggtctagcaaagatgttcccttgactatcaaagacccagctgtgggctttctggaaaccatttcccctggatactctatccacacctatctctggagaagacagtaatga

SEQ ID NO: 372 - protein, 536 aa, synthetic construct
  REGION 1..536: note = Variant of B-Glucocerebrosidase
MEFSSPSREECPKPLSRVSIMAGSLTGLLLLQAVSWASGARPCIPKSFGYSSVVCVCNATYCDSFDPPTLPALGTFSRYESTRSGRRMELSMGPIQANHTGTGLLLTLQPEQKFMKVKGFGGAMTDAAALNILALSPPAQNLLLKSYFSEEGIGYNIIRVPMASCDFSIRTYTYADTPDDFQLHNFSLPEEDTKLKIPLIHRALQLSQRPVSLFASPWTSPTWLKTNGAVNGKGSLKGQPGDIYHQTWARYFVKFLDAYAEHKLQFWAVTAENEPSAGLLSGYPFQCLGFTPEHQRDFIARDLGPTLANSTHHNVRLLMLDDQRLLLPHWAKVVLTDPEAAKYVHGIAVHWYLDFLAPAKATLGETHRLFPNTMLFASEACVGSKFWEQSVRLGSWDRGMQYSHSIITNLLYHVVGWTDWNLALNPEGGPNWVRNFVDSPIIVDITKDTFYKQPMFYHLGHFSKFIPEGSQRVGLVASQKNDLDAVALLHPDGSAVVVVLNRSSKDVPLTIKDPAVGFLETISPGYSIHTYLWRRQ

SEQ ID NO: 373 - DNA, 1614 bp, synthetic construct
  misc_feature 1..1614: note = Variant of B-Glucocerebrosidase
  source 1..1614: mol_type = other DNA
atggagttttcttctcctagtagagaagaatgccccaagccactgagcagggtgagcatcatggctggatccctcacagggctgcttcttttgcaggcagtctcatgggcctctggagccaggccctgtattcccaagtcattcggctactcctcagtggtgtgtgtatgcaatgccacctattgtgacagtttcgatcctccaactctccctgctctgggtaccttctcccggtatgagagcacaagaagtggaagacgcatggagctctcaatgggccctatacaggctaaccacactgggacaggtctgctgctgaccctccaacctgaacagaagtttcagaaagtcaagggatttggaggagccatgactgatgcagcagcactcaacatcttggccctgtctccaccagcccagaatctgctgttgaagtcctacttctcagaggaggggattggctacaacatcatccgggttcccatggctagctgtgacttctccattaggacctatacatacgctgacacccccgatgattttcagctccataatttcagtctccctgaaaatgacaccaaactgaagatacctctgattcacagagccttgcaactgtcccaaaggccagtgagcctcttcgcttctccctggactagtcctacatggctgaagactaatggtgctgttaatgggaaaggctccctgaaaggacagccaggtgacatatatcatcagacatgggcccgctactttgtgaaattccttgatgcctatgcagagcacaagctccaattctgggcagtcaccgcagaaaacgagccctcagctgggctgctgtctggctacccctttcagtgcttgggctttactcctgagcatcaacgggacttcattgcccgggatttggggccaacactggccaacagcacccaccacaatgtaagactcctcatgctggatgaccagaggctgctgctccctcattgggccaaggtggtgttgacagacccagaagctgccaaatatgttcatggcatcgctgtccactggtacctggattttttggcccctgcaaaggctactctgggagagacccacagactcttccccaataccatgctgtttgcatcagaagcctgcgtggggagcaaattctgggagcagtctgttaggctgggttcctgggatcggggcatgcaatattcccatagtataataactaacctcctctaccacgtggtaggatggacagactggaatctggctttgaacccagaaggaggccccaattgggtgcgcaactttgttgacagccccatcattgtggatatcacaaaggacaccttctacaaacagcctatgttctatcatctggggcactttagcaagttcattccagagggttcccagagagtaggcttggttgcctcacagaagaatgatctggatgctgtggcactcctgcatcctgacgggagtgcagtggtggtagtactgaacaggtctagcaaagatgttcccttgactatcaaagacccagctgtgggctttctggaaaccatttcccctggatactctatccacacctatctctggagaagacagtaatga

SEQ ID NO: 374 - protein, 536 aa, synthetic construct
  REGION 1..536: note = Variant of B-Glucocerebrosidase
MEFSSPSREECPKPLSRVSIMAGSLTGLLLLQAVSWASGARPCIPKSFGYSSVVCVCNATYCDSFDPPTLPALGTFSRYESTRSGRRMELSMGPIQANHTGTGLLLTLQPEQKFQKVKGFGGAMTDAAALNILALSPPAQNLLLKSYFSEEGIGYNIIRVPMASCDFSIRTYTYADTPDDFQLHNFSLPENDTKLKIPLIHRALQLSQRPVSLFASPWTSPTWLKTNGAVNGKGSLKGQPGDIYHQTWARYFVKFLDAYAEHKLQFWAVTAENEPSAGLLSGYPFQCLGFTPEHQRDFIARDLGPTLANSTHHNVRLLMLDDQRLLLPHWAKVVLTDPEAAKYVHGIAVHWYLDFLAPAKATLGETHRLFPNTMLFASEACVGSKFWEQSVRLGSWDRGMQYSHSIITNLLYHVVGWTDWNLALNPEGGPNWVRNFVDSPIIVDITKDTFYKQPMFYHLGHFSKFIPEGSQRVGLVASQKNDLDAVALLHPDGSAVVVVLNRSSKDVPLTIKDPAVGFLETISPGYSIHTYLWRRQ

SEQ ID NO: 375 - DNA, 1614 bp, synthetic construct
  misc_feature 1..1614: note = Variant of B-Glucocerebrosidase
  source 1..1614: mol_type = other DNA
atggagttttcttctcctagtagagaagaatgccccaagccactgagcagggtgagcatcatggctggatccctcacagggctgcttcttttgcaggcagtctcatgggcctctggagccaggccctgtattcccaagtcattcggctactcctcattggtgtgtgtatgcaatgccacctattgtgacagtttcgatcctccaactctccctgctctgggtaccttctcccggtatgagagcacaagaagtggaagacgcatggagctctcaatgggccctatacaggctaaccacactgggacaggtctgctgctgaccctccaacctgaacagaagtttcagaaagtcaagggatttggaggagccatgactgatgcagcagcactcaacatcttggccctgtctccaccagcccagaatctgctgttgaagtcctacttctcagaggaggggattggctacaacatcatccgggttcccatggctagctgtgacttctccattaggacctatacatacgctgacacccccgatgattttcagctccataatttcagtctccctgaagaagacaccaaactgaagatacctctgattcacagagccttgcaactgtcccaaaggccagtgagcctcttcgcttctccctggactagtcctacatggctgaagactaatggtgctgttaatgggaaaggctccctgaaaggacagccaggtgacatatatcatcagacatgggcccgctactttgtgaaattccttgatgcctatgcagagcacaagctccaattctgggcagtcaccgcagaaaacgagccctcagctgggctgctgtctggctacccctttcagtgcttgggctttactcctgagcatcaacgggacttcattgcccgggatttggggccaacactggccaacagcacccaccacaatgtaagactcctcatgctggatgaccagaggctgctgctccctcattgggccaaggtggtgttgacagacccagaagctgccaaatatgttcatggcatcgctgtccactggtacctggattttttggcccctgcaaaggctactctgggagagacccacagactcttccccaataccatgctgtttgcatcagaagcctgcgtggggagcaaattctgggagcagtctgttaggctgggttcctgggatcggggcatgcaatattcccatagtataataactaacctcctctaccacgtggtaggatggacagactggaatctggctttgaacccagaaggaggccccaattgggtgcgcaactttgttgacagccccatcattgtggatatcacaaaggacaccttctacaaacagcctatgttctatcatctggggcactttagcaagttcattccagagggttcccagagagtaggcttggttgcctcacagaagaatgatctggatgctgtggcactcctgcatcctgacgggagtgcagtggtggtagtactgaacaggtctagcaaagatgttcccttgactatcaaagacccagctgtgggctttctggaaaccatttcccctggatactctatccacacctatctctggagaagacagtaatga

SEQ ID NO: 376 - protein, 536 aa, synthetic construct
  REGION 1..536: note = Variant of B-Glucocerebrosidase
MEFSSPSREECPKPLSRVSIMAGSLTGLLLLQAVSWASGARPCIPKSFGYSSLVCVCNATYCDSFDPPTLPALGTFSRYESTRSGRRMELSMGPIQANHTGTGLLLTLQPEQKFQKVKGFGGAMTDAAALNILALSPPAQNLLLKSYFSEEGIGYNIIRVPMASCDFSIRTYTYADTPDDFQLHNFSLPEEDTKLKIPLIHRALQLSQRPVSLFASPWTSPTWLKTNGAVNGKGSLKGQPGDIYHQTWARYFVKFLDAYAEHKLQFWAVTAENEPSAGLLSGYPFQCLGFTPEHQRDFIARDLGPTLANSTHHNVRLLMLDDQRLLLPHWAKVVLTDPEAAKYVHGIAVHWYLDFLAPAKATLGETHRLFPNTMLFASEACVGSKFWEQSVRLGSWDRGMQYSHSIITNLLYHVVGWTDWNLALNPEGGPNWVRNFVDSPIIVDITKDTFYKQPMFYHLGHFSKFIPEGSQRVGLVASQKNDLDAVALLHPDGSAVVVVLNRSSKDVPLTIKDPAVGFLETISPGYSIHTYLWRRQ

SEQ ID NO: 377 - DNA, 1614 bp, synthetic construct
  misc_feature 1..1614: note = Variant of B-Glucocerebrosidase
  source 1..1614: mol_type = other DNA
atggagttttcttctcctagtagagaagaatgccccaagccactgagcagggtgagcatcatggctggatccctcacagggctgcttcttttgcaggcagtctcatgggcctctggagccaggccctgtattcccaagtcattcggctactcctcagtggtgtgtgtatgcaatgccacctattgtgacagtttcgatcctccaactctccctgctctgggtaccttctcccggtatgagagcacaagaagtggaagacgcatggagctctcaatgggccctatacaggctaaccacactgggacaggtctgctgctgaccctccaacctgaacagaagtttcagaaagtcaagggatttggaggagccatgactgatgcagcagcactcaacatcttggccctgtctccaccagcccagaatctgctgttgaagtcctacttctcagaggaggggattggctacaacatcatccgggttcccatggctagctgtgacttctccattaggacctatacatacgctgacacccccgatgattttcagctccataatttcagtctccctgaagaagacaccaaactgaagatacctctgattcacagagccttgcaactgtcccaaaggccagtgagcctcttcgcttctccctggactagtcctacatggctgaagactaatggtgctgttaatgggaaaggctccctgaaaggacagccaggtgacatatatcatcagacatgggcccgctactttgtgaaattccttgatgcctatgcagagcacaagctccaattctgggcagtcaccgcagaaaacgagccctcagctgggctgctgtctggctacccctttcagtgcttgggctttactcctgagcatcaacgggacttcattgcccgggatttggggccaacactggccaacagcacccaccacaatgtaagactcctcatgctggatgaccagaggctgctgctccctcattgggccaaggtggtgttgacagacccagaagctgccaaatatgttcatggcatcgctgtccactggtacctggattttttggcccctgcaaaggctactctgggagagacccacagactcttccccaataccatgctgtttgcatcagaagcctgcgtggggagcaaattctgggagcagtctgttaggctgggttcctgggatcggggcatgcaatattcccatagtataataactaacctcctctaccacgtggtaggatggacagactggaatctggctttgaacccagaaggaggccccaattgggtgcgcaactttgttgacagccccatcattgtggatatcacaaaggacaccttctacaaacagcctatgttctatcatctggggcactttagcaagttcattccagagggttcccagagagtaggcttggttgcctcacagaagaatgatctggatgctgtggcactcctgcatcctgacgggagtgcagtggtggtagtactgaacaggtctagcaaagatgttcccttgactatcaaagacccagctgtgggctttctggaaaccatttcctcgggatactctatccacacctatctctggagaagacagtaatga

SEQ ID NO: 378 - protein, 536 aa, synthetic construct
  REGION 1..536: note = Variant of B-Glucocerebrosidase
MEFSSPSREECPKPLSRVSIMAGSLTGLLLLQAVSWASGARPCIPKSFGYSSVVCVCNATYCDSFDPPTLPALGTFSRYESTRSGRRMELSMGPIQANHTGTGLLLTLQPEQKFQKVKGFGGAMTDAAALNILALSPPAQNLLLKSYFSEEGIGYNIIRVPMASCDFSIRTYTYADTPDDFQLHNFSLPEEDTKLKIPLIHRALQLSQRPVSLFASPWTSPTWLKTNGAVNGKGSLKGQPGDIYHQTWARYFVKFLDAYAEHKLQFWAVTAENEPSAGLLSGYPFQCLGFTPEHQRDFIARDLGPTLANSTHHNVRLLMLDDQRLLLPHWAKVVLTDPEAAKYVHGIAVHWYLDFLAPAKATLGETHRLFPNTMLFASEACVGSKFWEQSVRLGSWDRGMQYSHSIITNLLYHVVGWTDWNLALNPEGGPNWVRNFVDSPIIVDITKDTFYKQPMFYHLGHFSKFIPEGSQRVGLVASQKNDLDAVALLHPDGSAVVVVLNRSSKDVPLTIKDPAVGFLETISSGYSIHTYLWRRQ

SEQ ID NO: 379 - DNA, 1614 bp, synthetic construct
  misc_feature 1..1614: note = Variant of B-Glucocerebrosidase
  source 1..1614: mol_type = other DNA
atggagttttcttctcctagtagagaagaatgccccaagccactgagcagggtgagcatcatggctggatccctcacagggctgcttcttttgcaggcagtctcatgggcctctggagccaggccctgtattcccaagtcattcggctactcctcagtggtgtgtgtatgcaatgccacctattgtgacagtttcgatcctccaactctccctgctctgggtaccttctcccggtatgagagcacaagaagtggaagacgcatggagctctcaatgggccctatacaggctaaccacactgggacaggtctgctgctgaccctccaacctgaacagaagtttcagaaagtcaagggatttggaggagccatgactgatgcagcagcactcaacatcttggccctgtctccaccagcccagaatctgctgttgaagtcctacttctcagaggaggggattggctacaacatcatccgggttcccatggctagctgtgacttctccattaggacctatacatacgctgacacccccgatgattttcagctccataatttcagtctccctgaagaagacaccaaactgaagatacctctgattcacagagccttgcaactgtcccaaaggccagtgagcctcttcgcttctccctggactagtcctacatggctgaagactaatggtgctgttaatgggaaaggctccctgaaaggacagccaggtgacatatatcatcagacatgggcccgctactttgtgaaattccttgatgcctatgcagagcacaagctccaattctgggcagtcaccgcagaaaacgagccctcagctgggctgctgtctggctacccctttcagtgcttgggctttactcctgagcatcaacgggacttcattgcccgggatttggggccaacactggccaacagcacccaccacaatgtaagactcctcatgctggatgaccagaggctgctgctccctcattgggccaaggtggtgttgacagacccagaagctgccaaatatgttcatggcatcgctgtccactggtacctggattttttggcccctgcaaaggctactctgggagagacccacagactcttccccaataccatgctgtttgcatcagaagcctgcgtggggagcaaattctgggagcagtctgttaggctgggttcctgggatcggggcatgcaatattcccatagtataataactaacctcctctaccacgtggtaggatggacagactggaatctggctttgaacccagaaggaggccccaattgggtgcgcaactttgttgacagccccatcattgtggatatcacaaaggacctgttctacaaacagcctatgttctatcatctggggcactttagcaagttcattccagagggttcccagagagtaggcttggttgcctcacagaagaatgatctggatgctgtggcactcctgcatcctgacgggagtgcagtggtggtagtactgaacaggtctagcaaagatgttcccttgactatcaaagacccagctgtgggctttctggaaaccatttcccctggatactctatccacacctatctctggagaagacagtaatga

SEQ ID NO: 380 - protein, 536 aa, synthetic construct
  REGION 1..536: note = Variant of B-Glucocerebrosidase
MEFSSPSREECPKPLSRVSIMAGSLTGLLLLQAVSWASGARPCIPKSFGYSSVVCVCNATYCDSFDPPTLPALGTFSRYESTRSGRRMELSMGPIQANHTGTGLLLTLQPEQKFQKVKGFGGAMTDAAALNILALSPPAQNLLLKSYFSEEGIGYNIIRVPMASCDFSIRTYTYADTPDDFQLHNFSLPEEDTKLKIPLIHRALQLSQRPVSLFASPWTSPTWLKTNGAVNGKGSLKGQPGDIYHQTWARYFVKFLDAYAEHKLQFWAVTAENEPSAGLLSGYPFQCLGFTPEHQRDFIARDLGPTLANSTHHNVRLLMLDDQRLLLPHWAKVVLTDPEAAKYVHGIAVHWYLDFLAPAKATLGETHRLFPNTMLFASEACVGSKFWEQSVRLGSWDRGMQYSHSIITNLLYHVVGWTDWNLALNPEGGPNWVRNFVDSPIIVDITKDLFYKQPMFYHLGHFSKFIPEGSQRVGLVASQKNDLDAVALLHPDGSAVVVVLNRSSKDVPLTIKDPAVGFLETISPGYSIHTYLWRRQ

SEQ ID NO: 381 - DNA, 1614 bp, synthetic construct
  misc_feature 1..1614: note = Variant of B-Glucocerebrosidase
  source 1..1614: mol_type = other DNA
atggagttttcttctcctagtagagaagaatgccccaagccactgagcagggtgagcatcatggctggatccctcacagggctgcttcttttgcaggcagtctcatgggcctctggagccaggccctgtattcccaagtcattcggctactcctcagtggtgtgtgtatgcaatgccacctattgtgacagtttcgatcctccaactctccctgctctgggtaccttctcccggtatgagagcacaagaagtggaagacgcatggagctctcaatgggccctatacaggctaaccacactgggacaggtctgctgctgaccctccaacctgaacagaagtttcagaaagtcaagggatttggaggagccatgactgatgcagcagcactcaacatcttggccctgtctccaccagcccagaatctgctgttgaagtcctacttctcagaggaggggattggctacaacatcatccgggttcccatggctagctgtgacttctccattaggacctatacatacgctgacacccccgatgattttcagctccataatttcagtctccctgaagaagacaccaaactgaagatacctctgattcacagagccttgcaactgtcccaaaggccagtgagcctcttcgcttctccctggactagtcctacatggctgaagactaatggtgctgttaatgggaaaggctccctgaaaggacagccaggtgacatatatcatcagacatgggcccgctactttgtgaaattccttgatgcctatgcagagcacaagctccaattctgggcagtcaccgcagaaaacgagccctcagctgggctgctgtctggctacccctttcagtgcttgggctttactcctgagcatcaacgggacttcattgcccgggatttggggccaacactggccaacagcacccaccacaatgtaagactcctcatgctggatgaccagaggctgctgctccctcattgggccaaggtggtgttgacagacccagaagctgccaaatatgttcatggcatcgctgtccactggtacctggattttttggcccctgcaaaggctactctgggagagacccacagactcttccccaataccatgctgtttgcatcagaagcctgcgtggggagcaaattctgggagcagtctgttaggctgggttcctgggatcggggcatgcaatattcccatagtataataactaacctcctctaccacgtggtaggatggacagactggaatctggctttgaacccagaaggaggccccaattgggtgcgcaactttgttgacagccccatcattgtggatatcacaaaggacaccttctacaaacagcctatgttctatcatctggggcactttagcaagttcattccagagggttcccagagagtaggcttggttgcctcacagaagaatgatctggatgctgtggcactcctgcatcctgacgggagtgcagtggtggtagtactgaacaggtctagcaaagatgttcccttgactatcaaagacccagctgtgggcgagctggaaaccatttcccctggatactctatccacacctatctctggagaagacagtaatga

SEQ ID NO: 382 - protein, 536 aa, synthetic construct
  REGION 1..536: note = Variant of B-Glucocerebrosidase
MEFSSPSREECPKPLSRVSIMAGSLTGLLLLQAVSWASGARPCIPKSFGYSSVVCVCNATYCDSFDPPTLPALGTFSRYESTRSGRRMELSMGPIQANHTGTGLLLTLQPEQKFQKVKGFGGAMTDAAALNILALSPPAQNLLLKSYFSEEGIGYNIIRVPMASCDFSIRTYTYADTPDDFQLHNFSLPEEDTKLKIPLIHRALQLSQRPVSLFASPWTSPTWLKTNGAVNGKGSLKGQPGDIYHQTWARYFVKFLDAYAEHKLQFWAVTAENEPSAGLLSGYPFQCLGFTPEHQRDFIARDLGPTLANSTHHNVRLLMLDDQRLLLPHWAKVVLTDPEAAKYVHGIAVHWYLDFLAPAKATLGETHRLFPNTMLFASEACVGSKFWEQSVRLGSWDRGMQYSHSIITNLLYHVVGWTDWNLALNPEGGPNWVRNFVDSPIIVDITKDTFYKQPMFYHLGHFSKFIPEGSQRVGLVASQKNDLDAVALLHPDGSAVVVVLNRSSKDVPLTIKDPAVGELETISPGYSIHTYLWRRQ

SEQ ID NO: 383 - DNA, 1614 bp, synthetic construct
  misc_feature 1..1614: note = Variant of B-Glucocerebrosidase
  source 1..1614: mol_type = other DNA
atggagttttcttctcctagtagagaagaatgccccaagccactgagcagggtgagcatcatggctggatccctcacagggctgcttcttttgcaggcagtctcatgggcctctggagccaggccctgtattcccaagtcattcggctactcctcagtggtgtgtgtatgcaatgccacctattgtgacagtttcgatcctccaactctccctgctctgggtaccttctcccggtatgagagcacaagaagtggaagacgcatggagctctcaatgggccctatacaggctaaccacactgggacaggtctgctgctgaccctccaacctgaacagaagtttcagaaagtcaagggatttggaggagccatgactgatgcagcagcactcaacatcttggccctgtctccaccagcccagaatctgctgttgaagtcctacttctcagaggaggggattggctacaacatcatccgggttcccatggctagctgtgacttctccattaggacctatacatacgctgacacccccgatgattttcagctccataatttcagtctccctgaagaagacaccaaactgaagatacctctgattcacagagccttgcaactgtcccaaaggccagtgagcctcttcgcttctccctggactagtcctacatggctgaagactaatggtgctgttaatgggaaaggctccatgaaaggacagccaggtgacatatatcatcagacatgggcccgctactttgtgaaattccttgatgcctatgcagagcacaagctccaattctgggcagtcaccgcagaaaacgagccctcagctgggctgctgtctggctacccctttcagtgcttgggctttactcctgagcatcaacgggacttcattgcccgggatttggggccaacactggccaacagcacccaccacaatgtaagactcctcatgctggatgaccagaggctgctgctccctcattgggccaaggtggtgttgacagacccagaagctgccaaatatgttcatggcatcgctgtccactggtacctggattttttggcccctgcaaaggctactctgggagagacccacagactcttccccaataccatgctgtttgcatcagaagcctgcgtggggagcaaattctgggagcagtctgttaggctgggttcctgggatcggggcatgcaatattcccatagtataataactaacctcctctaccacgtggtaggatggacagactggaatctggctttgaacccagaaggaggccccaattgggtgcgcaactttgttgacagccccatcattgtggatatcacaaaggacaccttctacaaacagcctatgttctatcatctggggcactttagcaagttcattccagagggttcccagagagtaggcttggttgcctcacagaagaatgatctggatgctgtggcactcctgcatcctgacgggagtgcagtggtggtagtactgaacaggtctagcaaagatgttcccttgactatcaaagacccagctgtgggctttctggaaaccatttcccctggatactctatccacacctatctctggagaagacagtaatga

SEQ ID NO: 384 - protein, 536 aa, synthetic construct
  REGION 1..536: note = Variant of B-Glucocerebrosidase
MEFSSPSREECPKPLSRVSIMAGSLTGLLLLQAVSWASGARPCIPKSFGYSSVVCVCNATYCDSFDPPTLPALGTFSRYESTRSGRRMELSMGPIQANHTGTGLLLTLQPEQKFQKVKGFGGAMTDAAALNILALSPPAQNLLLKSYFSEEGIGYNIIRVPMASCDFSIRTYTYADTPDDFQLHNFSLPEEDTKLKIPLIHRALQLSQRPVSLFASPWTSPTWLKTNGAVNGKGSMKGQPGDIYHQTWARYFVKFLDAYAEHKLQFWAVTAENEPSAGLLSGYPFQCLGFTPEHQRDFIARDLGPTLANSTHHNVRLLMLDDQRLLLPHWAKVVLTDPEAAKYVHGIAVHWYLDFLAPAKATLGETHRLFPNTMLFASEACVGSKFWEQSVRLGSWDRGMQYSHSIITNLLYHVVGWTDWNLALNPEGGPNWVRNFVDSPIIVDITKDTFYKQPMFYHLGHFSKFIPEGSQRVGLVASQKNDLDAVALLHPDGSAVVVVLNRSSKDVPLTIKDPAVGFLETISPGYSIHTYLWRRQ

SEQ ID NO: 385 - DNA, 1614 bp, synthetic construct
  misc_feature 1..1614: note = Variant of B-Glucocerebrosidase
  source 1..1614: mol_type = other DNA
atggagttttcttctcctagtagagaagaatgccccaagccactgagcagggtgagcatcatggctggatccctcacagggctgcttcttttgcaggcagtctcatgggcctctggagccaggccctgtattcccaagtcattcggctactcctcagtggtgtgtgtatgcaatgccacctattgtgacagtttcgatcctccaactctccctgctctgggtaccttctcccggtatgagagcacaagaagtggaagacgcatggagctctcaatgggccctatacaggctaaccacactgggacaggtctgctgctgaccctccaacctgaacagaagtttcagaaagtcaagggatttggaggagccatgactgatgcagcagcactcaacatcttggccctgtctccaccagcccagaatctgctgttgaagtcctacttctcagaggaggggattggctacaacatcatccgggttcccatggctagctgtgacttctccattaggacctatacatacgctgacacccccgatgattttcagctccataatttcagtctccctgaagaagacaccaaactgaagatacctctgattcacagagccttgcaactgtcccaaaggccagtgagcctcttcgcttctccctggactagtcctacatggctgaagactaatggtgctgttaatgggaaaggctccctgaaaggacagccaggtgacatatatcatcagacatgggcccgctactttgtgaaattccttgatgcctatgcagagcacaagctccaattctgggcagtcaccgcagaaaacgagccctcagctgggctgctgtctggctacccctttcagtgcttgggctttactcctgagcatcaacgggacttcattgcccgggatttggggccaacactggccaacagcacccaccacaatgtaagactcctcatgctggatgaccagaggctgctgctccctcattgggccaaggtggtgttgacagacccagaagctgccaaatatgttcatggcatcgctgtccactggtacctggattttttggcccctgcaaaggctactctgggagagacccacagactcttccccaataccatgctgtttgcatcagaagcctgcgtggggagcaaattctgggagcagtctgttaggctgggttcctgggatcggggcatgcaatattcccatagtataataactaacctcctctaccacgtggtaggatggacagactggaatctggctttgaacccagaaggaggccccaattgggtgcgcaactttgttgacagccccatcattgtggatatcacaaaggacaccttctacaaacagcctatgttctatcatctggggcactttagcaagttcattccagagggttcccagagagtaggcttggttgcctcacagaagcatgatctggatgctgtggcactcctgcatcctgacgggagtgcagtggtggtagtactgaacaggtctagcaaagatgttcccttgactatcaaagacccagctgtgggctttctggaaaccatttcccctggatactctatccacacctatctctggagaagacagtaatga

SEQ ID NO: 386 - protein, 536 aa, synthetic construct
  REGION 1..536: note = Variant of B-Glucocerebrosidase
MEFSSPSREECPKPLSRVSIMAGSLTGLLLLQAVSWASGARPCIPKSFGYSSVVCVCNATYCDSFDPPTLPALGTFSRYESTRSGRRMELSMGPIQANHTGTGLLLTLQPEQKFQKVKGFGGAMTDAAALNILALSPPAQNLLLKSYFSEEGIGYNIIRVPMASCDFSIRTYTYADTPDDFQLHNFSLPEEDTKLKIPLIHRALQLSQRPVSLFASPWTSPTWLKTNGAVNGKGSLKGQPGDIYHQTWARYFVKFLDAYAEHKLQFWAVTAENEPSAGLLSGYPFQCLGFTPEHQRDFIARDLGPTLANSTHHNVRLLMLDDQRLLLPHWAKVVLTDPEAAKYVHGIAVHWYLDFLAPAKATLGETHRLFPNTMLFASEACVGSKFWEQSVRLGSWDRGMQYSHSIITNLLYHVVGWTDWNLALNPEGGPNWVRNFVDSPIIVDITKDTFYKQPMFYHLGHFSKFIPEGSQRVGLVASQKHDLDAVALLHPDGSAVVVVLNRSSKDVPLTIKDPAVGFLETISPGYSIHTYLWRRQ

SEQ ID NO: 387 - DNA, 1614 bp, synthetic construct
  misc_feature 1..1614: note = Variant of B-Glucocerebrosidase
  source 1..1614: mol_type = other DNA
atggagttttcttctcctagtagagaagaatgccccaagccactgagcagggtgagcatcatggctggatccctcacagggctgcttcttttgcaggcagtctcatgggcctctggagccaggccctgtattcccaagtcattcggctactcctcagtggtgtgtgtatgcaatgccacctattgtgacagtttcgatcctccaactctccctgctctgggtaccttctcccggtatgagagcacaagaagtggaagacgcatggagctctcaatgggccctatacaggctaaccacactgggacaggtctgctgctgaccctccaacctgaacagaagtttcggaaagtcaagggatttggaggagccatgactgatgcagcagcactcaacatcttggccctgtctccaccagcccagaatctgctgttgaagtcctacttctcagaggaggggattggctacaacatcatccgggttcccatggctagctgtgacttctccattaggacctatacatacgctgacacccccgatgattttcagctccataatttcagtctccctgaagaagacaccaaactgaagatacctctgattcacagagccttgcaactgtcccaaaggccagtgagcctcttcgcttctccctggactagtcctacatggctgaagactaatggtgctgttaatgggaaaggctccctgaaaggacagccaggtgacatatatcatcagacatgggcccgctactttgtgaaattccttgatgcctatgcagagcacaagctccaattctgggcagtcaccgcagaaaacgagccctcagctgggctgctgtctggctacccctttcagtgcttgggctttactcctgagcatcaacgggacttcattgcccgggatttggggccaacactggccaacagcacccaccacaatgtaagactcctcatgctggatgaccagaggctgctgctccctcattgggccaaggtggtgttgacagacccagaagctgccaaatatgttcatggcatcgctgtccactggtacctggattttttggcccctgcaaaggctactctgggagagacccacagactcttccccaataccatgctgtttgcatcagaagcctgcgtggggagcaaattctgggagcagtctgttaggctgggttcctgggatcggggcatgcaatattcccatagtataataactaacctcctctaccacgtggtaggatggacagactggaatctggctttgaacccagaaggaggccccaattgggtgcgcaactttgttgacagccccatcattgtggatatcacaaaggacaccttctacaaacagcctatgttctatcatctggggcactttagcaagttcattccagagggttcccagagagtaggcttggttgcctcacagaagaatgatctggatgctgtggcactcctgcatcctgacgggagtgcagtggtggtagtactgaacaggtctagcaaagatgttcccttgactatcaaagacccagctgtgggctttctggaaaccatttcccctggatactctatccacacctatctctggagaagacagtaatga

SEQ ID NO: 388 - protein, 536 aa, synthetic construct
  REGION 1..536: note = Variant of B-Glucocerebrosidase
MEFSSPSREECPKPLSRVSIMAGSLTGLLLLQAVSWASGARPCIPKSFGYSSVVCVCNATYCDSFDPPTLPALGTFSRYESTRSGRRMELSMGPIQANHTGTGLLLTLQPEQKFRKVKGFGGAMTDAAALNILALSPPAQNLLLKSYFSEEGIGYNIIRVPMASCDFSIRTYTYADTPDDFQLHNFSLPEEDTKLKIPLIHRALQLSQRPVSLFASPWTSPTWLKTNGAVNGKGSLKGQPGDIYHQTWARYFVKFLDAYAEHKLQFWAVTAENEPSAGLLSGYPFQCLGFTPEHQRDFIARDLGPTLANSTHHNVRLLMLDDQRLLLPHWAKVVLTDPEAAKYVHGIAVHWYLDFLAPAKATLGETHRLFPNTMLFASEACVGSKFWEQSVRLGSWDRGMQYSHSIITNLLYHVVGWTDWNLALNPEGGPNWVRNFVDSPIIVDITKDTFYKQPMFYHLGHFSKFIPEGSQRVGLVASQKNDLDAVALLHPDGSAVVVVLNRSSKDVPLTIKDPAVGFLETISPGYSIHTYLWRRQ

SEQ ID NO: 389 - DNA, 1614 bp, synthetic construct
  misc_feature 1..1614: note = Variant of B-Glucocerebrosidase
  source 1..1614: mol_type = other DNA
atggagttttcttctcctagtagagaagaatgccccaagccactgagcagggtgagcatcatggctggatccctcacagggctgcttcttttgcaggcagtctcatgggcctctggagccaggccctgtattcccaagtcattcggctactcctcagtggtgtgtgtatgcaataatacctattgtgacagtttcgatcctccaactctccctgctctgggtaccttctcccggtatgagagcacaagaagtggaagacgcatggagctctcaatgggccctatacaggctaaccacactgggacaggtctgctgctgaccctccaacctgaacagaagtttcagaaagtcaagggatttggaggagccatgactgatgcagcagcactcaacatcttggccctgtctccaccagcccagaatctgctgttgaagtcctacttctcagaggaggggattggctacaacatcatccgggttcccatggctagctgtgacttctccattaggacctatacatacgctgacacccccgatgattttcagctccataatttcagtctccctgaagaagacaccaaactgaagatacctctgattcacagagccttgcaactgtcccaaaggccagtgagcctcttcgcttctccctggactggtcctacatggctgaagactaatggtgctgttaatgggaaaggctccctgaaaggacagccaggtgacatatatcatcagacatgggcccgctactttgtgaaattccttgatgcctatgcagagcacaagctccaattctgggcagtcaccgcagaaaacgagccctcagctgggctgctgtctggctacccctttcagtgcttgggctttactcctgagcatcaacgggacttcattgcccgggatttggggccaacactggccaacagcacccaccacaatgtaagactcctcatgctggatgaccagaggctgctgctccctcattgggccaaggtggtgttgacagacccagaagctgccaaatatgttcatggcatcgctgtccactggtacctggattttttggcccctgcaaaggctactctgggagagacccacagactcttccccaataccatgctgtttgcatcagaagcctgcgtggggagcaaattctgggagcagtctgttaggctgggttcctgggatcggggcatgcaatattcccatagtataataactaacctcctctaccacgtggtaggatggacagactggaatctggctttgaacccagaaggaggccccaattgggtgcgcaactttgttgacagccccatcattgtggatatcacaaaggacaccttctacaaacagcctatgttctatcatctggggcactttagcaagttcattccagagggttcccagagagtaggcttggttgcctcacagaagaatgatctggatgctgtggcactcctgcatcctgacgggagtgcagtggtggtagtactgaacaggtctagcaaagatgttcccttgactatcaaagacccagctgtgggctttctggaaaccatttcccctggatactctatccacacctatctctggagaagacagtaatga

SEQ ID NO: 390 - protein, 536 aa, synthetic construct
  REGION 1..536: note = Variant of B-Glucocerebrosidase
MEFSSPSREECPKPLSRVSIMAGSLTGLLLLQAVSWASGARPCIPKSFGYSSVVCVCNNTYCDSFDPPTLPALGTFSRYESTRSGRRMELSMGPIQANHTGTGLLLTLQPEQKFQKVKGFGGAMTDAAALNILALSPPAQNLLLKSYFSEEGIGYNIIRVPMASCDFSIRTYTYADTPDDFQLHNFSLPEEDTKLKIPLIHRALQLSQRPVSLFASPWTGPTWLKTNGAVNGKGSLKGQPGDIYHQTWARYFVKFLDAYAEHKLQFWAVTAENEPSAGLLSGYPFQCLGFTPEHQRDFIARDLGPTLANSTHHNVRLLMLDDQRLLLPHWAKVVLTDPEAAKYVHGIAVHWYLDFLAPAKATLGETHRLFPNTMLFASEACVGSKFWEQSVRLGSWDRGMQYSHSIITNLLYHVVGWTDWNLALNPEGGPNWVRNFVDSPIIVDITKDTFYKQPMFYHLGHFSKFIPEGSQRVGLVASQKNDLDAVALLHPDGSAVVVVLNRSSKDVPLTIKDPAVGFLETISPGYSIHTYLWRRQ

SEQ ID NO: 391 - DNA, 1614 bp, synthetic construct
  misc_feature 1..1614: note = Variant of B-Glucocerebrosidase
  source 1..1614: mol_type = other DNA
atggagttttcttctcctagtagagaagaatgccccaagccactgagcagggtgagcatcatggctggatccctcacagggctgcttcttttgcaggcagtctcatgggcctctggagccaggccctgtattcccaagtcattcggctactcctcagtggtgtgtgtatgcaatgccacctattgtgacagtttcgatcctccaactctccctgctctgggtaccttctcccggtatgagagcacaagaagtggaagacgcatggagctctcaatgggccctatacaggctaaccacactgggacaggtctgctgctgaccctccaacctgaacagaagtttcagaaagtcaagggatttggaggagccatgactgatgcagcagcactcaacatcttggccctgtctccaccagcccagaatctgctgttgaagtcctacttctcagaggaggggattggctacaacatcatccgggttcccatggctagctgtgacttctccattaggacctatacatacgctgacacccccgatgattttcagctccataatttcagtctccctgaagaagacaccaaactgaagatacctctgattcacagagccttgcaactgtcccaaaggccagtgagcctcttcgcttctccctggactagtcctacatggctgaagactaatggtgctgttaatgggaaaggctccctgaaaggacagccaggtgacatatatcatcagacatgggcccgctactttgtgaaattccttgatgcctatgcagagcacaagctccaattctgggcagtcaccgcagaaaacgagccctcagctgggctgctgtctggctacccctttcagtgcttgggctttactcctgagcatcaacgggacttcattgcccgggatttggggccaacactggccaacagcacccaccacaatgtaagactcctcatgctggatgaccagaggctgctgctccctcattgggccaaggtggtgttgacagacccagaagctgccaaatatgttcatggcatcgctgtccactggtacctggattttttggcccctgcaaaggctactctgggagagacccacagactcttccccaataccatgctgtttgcatcagaagcctgcgtggggagcaaattctgggagcagtctgttaggctgggttcctgggatcggggcatgcaatattcccatagtataataactaacctcctctaccacgtggtaggatggacagactggaatctggctttgaacccagaaggaggccccaattgggtgcgcaactttgttgacagccccatcattgtggatatcacaaaggacaccttctacaaacagcctatgttctatcatctggggcactttagcaagttcattccagagggttcccagagagtaggcttggttgcctcacagaagaatgatctggatgctgtggcactcgggcatcctgacgggagtgcagtggtggtagtactgaacaggtctagcaaagatgttcccttgactatcaaagacccagctgtgggctttctggaaaccatttcccctggatactctatccacacctatctctggagaagacagtaatga

SEQ ID NO: 392 - protein, 536 aa, synthetic construct
  REGION 1..536: note = Variant of B-Glucocerebrosidase
MEFSSPSREECPKPLSRVSIMAGSLTGLLLLQAVSWASGARPCIPKSFGYSSVVCVCNATYCDSFDPPTLPALGTFSRYESTRSGRRMELSMGPIQANHTGTGLLLTLQPEQKFQKVKGFGGAMTDAAALNILALSPPAQNLLLKSYFSEEGIGYNIIRVPMASCDFSIRTYTYADTPDDFQLHNFSLPEEDTKLKIPLIHRALQLSQRPVSLFASPWTSPTWLKTNGAVNGKGSLKGQPGDIYHQTWARYFVKFLDAYAEHKLQFWAVTAENEPSAGLLSGYPFQCLGFTPEHQRDFIARDLGPTLANSTHHNVRLLMLDDQRLLLPHWAKVVLTDPEAAKYVHGIAVHWYLDFLAPAKATLGETHRLFPNTMLFASEACVGSKFWEQSVRLGSWDRGMQYSHSIITNLLYHVVGWTDWNLALNPEGGPNWVRNFVDSPIIVDITKDTFYKQPMFYHLGHFSKFIPEGSQRVGLVASQKNDLDAVALGHPDGSAVVVVLNRSSKDVPLTIKDPAVGFLETISPGYSIHTYLWRRQ

SEQ ID NO: 393 - DNA, 1614 bp, synthetic construct
  misc_feature 1..1614: note = Variant of B-Glucocerebrosidase
  source 1..1614: mol_type = other DNA
atggagttttcttctcctagtagagaagaatgccccaagccactgagcagggtgagcatcatggctggatccctcacagggctgcttcttttgcaggcagtctcatgggcctctggagccaggccctgtattcccaagtcattcggctactcctcagtggtgtgtgtatgcaatgccacctattgtgacagtttcgatcctccaactctccctgctctgggtaccttctcccggtatgagagcacaagaagtggaagacgcatggagctctcaatgggccctatacaggctaaccacactgggacaggtctgctgctgaccctccaacctgaacagaagtttcagaaagtcaagggatttggaggagccatgactgatgcagcagcactcaacatcttggccctgtctccaccagcccagaatctgctgttgaagtcctacttctcagaggaggggattggctacaacatcatccgggttcccatggctagctgtgacttctccattaggacctatacatacgctgacacccccgatgattttcagctccataatttcagtctccctgaagaagacaccaaactgaagatacctctgattcacagagccttgcaactgtcccaaaggccagtgagcctcttcgcttctccctggactagtcctacatggctgaagactaatggtgctgttaatgggaaaggctccctgaaaggacagccaggtgacatatatcatcagacatgggcccgctactttgtgaaattccttgatacttatgcagagcacaagctccaattctgggcagtcaccgcagaaaacgagccctcagctgggctgctgtctggctacccctttcagtgcttgggctttactcctgagcatcaacgggacttcattgcccgggatttggggccaacactggccaacagcacccaccacaatgtaagactcctcatgctggatgaccagaggctgctgctccctcattgggccaaggtggtgttgacagacccagaagctgccaaatatgttcatggcatcgctgtccactggtacctggattttttggcccctgcaaaggctactctgggagagacccacagactcttccccaataccatgctgtttgcatcagaagcctgcgtggggagcaaattctgggagcagtctgttaggctgggttcctgggatcggggcatgcaatattcccatagtataataactaacctcctctaccacgtggtaggatggacagactggaatctggctttgaacccagaaggaggccccaattgggtgcgcaactttgttgacagccccatcattgtggatatcacaaaggacaccttctacaaacagcctatgttctatcatctggggcactttagcaagttcattccagagggttcccagagagtaggcttggttgcctcacagaagaatgatctggatgctgtggcactcctgcatcctgacgggagtgcagtggtggtagtactgaacaggtctagcaaagatgttcccttgactatcaaagacccagctgtgggctttctggaaaccatttcccctggatactctatccacacctatctctggagaagacagtaatga

SEQ ID NO: 394 - protein, 536 aa, synthetic construct
  REGION 1..536: note = Variant of B-Glucocerebrosidase
MEFSSPSREECPKPLSRVSIMAGSLTGLLLLQAVSWASGARPCIPKSFGYSSVVCVCNATYCDSFDPPTLPALGTFSRYESTRSGRRMELSMGPIQANHTGTGLLLTLQPEQKFQKVKGFGGAMTDAAALNILALSPPAQNLLLKSYFSEEGIGYNIIRVPMASCDFSIRTYTYADTPDDFQLHNFSLPEEDTKLKIPLIHRALQLSQRPVSLFASPWTSPTWLKTNGAVNGKGSLKGQPGDIYHQTWARYFVKFLDTYAEHKLQFWAVTAENEPSAGLLSGYPFQCLGFTPEHQRDFIARDLGPTLANSTHHNVRLLMLDDQRLLLPHWAKVVLTDPEAAKYVHGIAVHWYLDFLAPAKATLGETHRLFPNTMLFASEACVGSKFWEQSVRLGSWDRGMQYSHSIITNLLYHVVGWTDWNLALNPEGGPNWVRNFVDSPIIVDITKDTFYKQPMFYHLGHFSKFIPEGSQRVGLVASQKNDLDAVALLHPDGSAVVVVLNRSSKDVPLTIKDPAVGFLETISPGYSIHTYLWRRQ

SEQ ID NO: 395 - DNA, 1614 bp, synthetic construct
  misc_feature 1..1614: note = Variant of B-Glucocerebrosidase
  source 1..1614: mol_type = other DNA
atggagttttcttctcctagtagagaagaatgccccaagccactgagcagggtgagcatcatggctggatccctcacagggctgcttcttttgcaggcagtctcatgggcctctggagccaggccctgtattcccaagtcattcggctactcctcagtggtgtgtgtatgcaatgccacctattgtgacagtttcgatcctccaactctccctgctctgggtaccttctcccggtatgagagcacaagaagtggaagacgcatggagctctcaatgggccctatacaggctaaccacactgggacaggtctgctgctgaccctccaacctgaacagaagtttcagaaagtcaagggatttggaggagccatgactgatgcagcagcactcaacatcttggccctgtctccaccagcccagaatctgctgttgaagtcctacttctcagaggaggggattggctacaacatcatccgggttcccatggctagctgtgacttctccattaggacctatacatacgctgacacccccgatgattttcagctccataatttcagtctccctgaagaagacaccaaactgaagatacctctgattcacagagccttgcaactgtcccaaaggccagtgagcctcttcgcttctccctggactagtcctacatggctgaagactaatggtgctgttaatgggaaaggctccctgaaaggacagccaggtgacatatatcatcagacatgggcccgctactttgtgaaattccttgatgcctatgcagagcacaagctccaattctgggcagtcaccgcagaaaacgagccctcagctgggctgctgtctggctacccctttcagtgcttgggctttactcctgagcatcaacgggacttcattgcccgggatttggggccaacactggccaacagcacccaccacaatgtaagactcctcatgctggatgaccagaggctgctgctccctcattgggccaaggtggtgttgacagacccagaagctgccaaatatgttcatggcatcgctgtccactggtacctggattttttggcccctgcaaaggctactctgggagagacccacagactcttccccaataccatgctgtttgcatcagaagcctgcgtggggagcaaattctgggagcagtctgttaggctgggttcctgggatcggggcatgcaatattcccatagtataataactaacctcctctaccacgtggtaggatggacagactggaatctggctttgaacccagaaggaggccccaattgggtgcgcaactttgttgacagccccatcattgtggatatcacaaaggacaccttctacaaacagcctatgttctatcatctggggcactttagcaagttcattaatgagggttcccagagagtaggcttggttgcctcacagaagaatgatctggatgctgtggcactcctgcatcctgacgggagtgcagtggtggtagtactgaacaggtctagcaaagatgttcccttgactatcaaagacccagctgtgggctttctggaaaccatttcccctggatactctatccacacctatctctggagaagacagtaatga

SEQ ID NO: 396 - protein, 536 aa, synthetic construct
  REGION 1..536: note = Variant of B-Glucocerebrosidase
MEFSSPSREECPKPLSRVSIMAGSLTGLLLLQAVSWASGARPCIPKSFGYSSVVCVCNATYCDSFDPPTLPALGTFSRYESTRSGRRMELSMGPIQANHTGTGLLLTLQPEQKFQKVKGFGGAMTDAAALNILALSPPAQNLLLKSYFSEEGIGYNIIRVPMASCDFSIRTYTYADTPDDFQLHNFSLPEEDTKLKIPLIHRALQLSQRPVSLFASPWTSPTWLKTNGAVNGKGSLKGQPGDIYHQTWARYFVKFLDAYAEHKLQFWAVTAENEPSAGLLSGYPFQCLGFTPEHQRDFIARDLGPTLANSTHHNVRLLMLDDQRLLLPHWAKVVLTDPEAAKYVHGIAVHWYLDFLAPAKATLGETHRLFPNTMLFASEACVGSKFWEQSVRLGSWDRGMQYSHSIITNLLYHVVGWTDWNLALNPEGGPNWVRNFVDSPIIVDITKDTFYKQPMFYHLGHFSKFINEGSQRVGLVASQKNDLDAVALLHPDGSAVVVVLNRSSKDVPLTIKDPAVGFLETISPGYSIHTYLWRRQ

SEQ ID NO: 397 - DNA, 1614 bp, synthetic construct
  misc_feature 1..1614: note = Variant of B-Glucocerebrosidase
  source 1..1614: mol_type = other DNA
atggagttttcttctcctagtagagaagaatgccccaagccactgagcagggtgagcatcatggctggatccctcacagggctgcttcttttgcaggcagtctcatgggcctctggagccaggccctgtattcccaagtcattcggctacccttcagtggtgtgtgtatgcaatgccacctattgtgacagtttcgatcctccaactctccctgctctgggtaccttctcccggtatgagagcacaagaagtggaagacgcatggagctctcaatgggccctatacaggctaaccacactgggacaggtctgctgctgaccctccaacctgaacagaagtttcagaaagtcaagggatttggaggagccatgactgatgcagcagcactcaacatcttggccctgtctccaccagcccagaatctgctgttgaagtcctacttctcagaggaggggattggctacaacatcatccgggttcccatggctagctgtgacttctccattaggacctatacatacgctgacacccccgatgattttcagctccataatttcagtctccctgaagaagacaccaaactgaagatacctctgattcacagagccttgcaactgtcccaaaggccagtgagcctcttcgcttctccctggactagtcctacatggctgaagactaatggtgctgttaatgggaaaggctccctgaaaggacagccaggtgacatatatcatcagacatgggcccgctactttgtgaaattccttgatgcctatgcagagcacaagctccaattctgggcagtcaccgcagaaaacgagccctcagctgggctgctgtctggctacccctttcagtgcttgggctttactcctgagcatcaacgggacttcattgcccgggatttggggccaacactggccaacagcacccaccacaatgtaagactcctcatgctggatgaccagaggctgctgctccctcattgggccaaggtggtgttgacagacccagaagctgccaaatatgttcatggcatcgctgtccactggtacctggattttttggcccctgcaaaggctactctgggagagacccacagactcttccccaataccatgctgtttgcatcagaagcctgcgtggggagcaaattctgggagcagtctgttaggctgggttcctgggatcggggcatgcaatattcccatagtataataactaacctcctctaccacgtggtaggatggacagactggaatctggctttgaacccagaaggaggccccaattgggtgcgcaactttgttgacagccccatcattgtggatatcacaaaggacaccttctacaaacagcctatgttctatcatctggggcactttagcaagttcattccagagggttcccagagagtaggcttggttgcctcacagaagaatgatctggatgctgtggcactcctgcatcctgacgggagtgcagtggtggtagtactgaacaggtctagcaaagatgttcccttgactatcaaagacccagctgtgggctttctggaaaccatttcccctggatactctatccacacctatctctggagaagacagtaatga

SEQ ID NO: 398 - protein, 536 aa, synthetic construct
  REGION 1..536: note = Variant of B-Glucocerebrosidase
MEFSSPSREECPKPLSRVSIMAGSLTGLLLLQAVSWASGARPCIPKSFGYPSVVCVCNATYCDSFDPPTLPALGTFSRYESTRSGRRMELSMGPIQANHTGTGLLLTLQPEQKFQKVKGFGGAMTDAAALNILALSPPAQNLLLKSYFSEEGIGYNIIRVPMASCDFSIRTYTYADTPDDFQLHNFSLPEEDTKLKIPLIHRALQLSQRPVSLFASPWTSPTWLKTNGAVNGKGSLKGQPGDIYHQTWARYFVKFLDAYAEHKLQFWAVTAENEPSAGLLSGYPFQCLGFTPEHQRDFIARDLGPTLANSTHHNVRLLMLDDQRLLLPHWAKVVLTDPEAAKYVHGIAVHWYLDFLAPAKATLGETHRLFPNTMLFASEACVGSKFWEQSVRLGSWDRGMQYSHSIITNLLYHVVGWTDWNLALNPEGGPNWVRNFVDSPIIVDITKDTFYKQPMFYHLGHFSKFIPEGSQRVGLVASQKNDLDAVALLHPDGSAVVVVLNRSSKDVPLTIKDPAVGFLETISPGYSIHTYLWRRQ

SEQ ID NO: 399 - DNA, 1614 bp, synthetic construct
  misc_feature 1..1614: note = Variant of B-Glucocerebrosidase
  source 1..1614: mol_type = other DNA
atggagttttcttctcctagtagagaagaatgccccaagccactgagcagggtgagcatcatggctggatccctcacagggctgcttcttttgcaggcagtctcatgggcctctggagccaggccctgtattcccaagtcattcggctactcctcagtggtgtgtgtatgcaatgccacctattgtgacagtttcgatcctccaactctccctgctctgggtaccttctcccggtatgagagcacaagaagtggaagacgcatggagctctcaatgggccctatacaggctaaccacactgggacaggtctgctgctgaccctccaacctgaacagaagtttcagaaagtcaagggatttggaggagccatgactgatgcagcagcactcaacatcttggccctgtctccaccagcccagaatctgctgttgaagtcctacttctcagaggaggggattggctacaacatcatccgggttcccatggctagctgtgacttctccattaggacctatacatacgctgacacccccgatgattttcagctccataatttcagtctccctgaagaagacaccaaactgaagatacctctgattcacagagccttgcaactgtcccaaaggccagtgagcctcttcgcttctccctggactagtcctacatggctgaagactaatggtgctgttaatgggaaaggctccctgaaaggacagccaggtgacatatatcatcagacatgggcccgctactttgtgaaattccttgatgcctatgcagagcacaagctccaattctgggcagtcaccgcagaaaacgagccctcagctgggctgctgtctggctacccctttcagtgcttgggctttactcctgagcatcaacgggacttcattgcccgggatttggggccaacactggccaacagcacccaccacaatgtaagactcctcatgctggatgaccagaggctgctgctccctcattgggccaaggtggtgttgacagacccagaagctgccaaatatgttcatggcatcgctgtccactggtacctggattttttggcccctgcaaaggctactctgggagagacccacagactcttccccaataccatgctgtttgcatcagaagcctgcgtggggagcaaattctgggagcagtctgttaggctgggttcctgggatcggggcatgcaatattcccatagtataataactaacctcctctaccacgtgtgtggatggacagactggaatctggctttgaacccagaaggaggccccaattgggtgcgcaactttgttgacagccccatcattgtggatatcacaaaggacaccttctacaaacagcctatgttctatcatctggggcactttagcaagttcattccagagggttcccagagagtaggcttggttgcctcacagaagaatgatctggatgctgtggcactcctgcatcctgacgggagtgcagtggtggtagtactgaacaggtctagcaaagatgttcccttgactatcaaagacccagctgtgggctttctggaaaccatttcccctggatactctatccacacctatctctggagaagacagtaatga

SEQ ID NO: 400 - protein, 536 aa, synthetic construct
  REGION 1..536: note = Variant of B-Glucocerebrosidase
MEFSSPSREECPKPLSRVSIMAGSLTGLLLLQAVSWASGARPCIPKSFGYSSVVCVCNATYCDSFDPPTLPALGTFSRYESTRSGRRMELSMGPIQANHTGTGLLLTLQPEQKFQKVKGFGGAMTDAAALNILALSPPAQNLLLKSYFSEEGIGYNIIRVPMASCDFSIRTYTYADTPDDFQLHNFSLPEEDTKLKIPLIHRALQLSQRPVSLFASPWTSPTWLKTNGAVNGKGSLKGQPGDIYHQTWARYFVKFLDAYAEHKLQFWAVTAENEPSAGLLSGYPFQCLGFTPEHQRDFIARDLGPTLANSTHHNVRLLMLDDQRLLLPHWAKVVLTDPEAAKYVHGIAVHWYLDFLAPAKATLGETHRLFPNTMLFASEACVGSKFWEQSVRLGSWDRGMQYSHSIITNLLYHVCGWTDWNLALNPEGGPNWVRNFVDSPIIVDITKDTFYKQPMFYHLGHFSKFIPEGSQRVGLVASQKNDLDAVALLHPDGSAVVVVLNRSSKDVPLTIKDPAVGFLETISPGYSIHTYLWRRQ

SEQ ID NO: 401 - DNA, 1614 bp, synthetic construct
  misc_feature 1..1614: note = Variant of B-Glucocerebrosidase
  source 1..1614: mol_type = other DNA
atggagttttcttctcctagtagagaagaatgccccaagccactgagcagggtgagcatcatggctggatccctcacagggctgcttcttttgcaggcagtctcatgggcctctggagccaggccctgtattcccaagtcattcggctactcctcagtggtgtgtgtatgcaatgccacctattgtgacagtttcgatcctccaactctccctgctctgggtaccttctcccggtatgagagcacaagaagtggaagacgcatggagctctcaatgggccctatacaggctaaccacactgggacatcgctgctgctgaccctccaacctgaacagaagtttcagaaagtcaagggatttggaggagccatgactgatgcagcagcactcaacatcttggccctgtctccaccagcccagaatctgctgttgaagtcctacttctcagaggaggggattggctacaacatcatccgggttcccatggctagctgtgacttctccattaggacctatacatacgctgacacccccgatgattttcagctccataatttcagtctccctgaagaagacaccaaactgaagatacctctgattcacagagccttgcaactgtcccaaaggccagtgagcctcttcgcttctccctggactagtcctacatggctgaagactaatggtgctgttaatgggaaaggctccctgaaaggacagccaggtgacatatatcatcagacatgggcccgctactttgtgaaattccttgatgcctatgcagagcacaagctccaattctgggcagtcaccgcagaaaacgagccctcagctgggctgctgtctggctacccctttcagtgcttgggctttactcctgagcatcaacgggacttcattgcccgggatttggggccaacactggccaacagcacccaccacaatgtaagactcctcatgctggatgaccagaggctgctgctccctcattgggccaaggtggtgttgacagacccagaagctgccaaatatgttcatggcatcgctgtccactggtacctggattttttggcccctgcaaaggctactctgggagagacccacagactcttccccaataccatgctgtttgcatcagaagcctgcgtggggagcaaattctgggagcagtctgttaggctgggttcctgggatcggggcatgcaatattcccatagtataataactaacctcctctaccacgtggtaggatggacagactggaatctggctttgaacccagaaggaggccccaattgggtgcgcaactttgttgacagccccatcattgtggatatcacaaaggacaccttctacaaacagcctatgttctatcatctggggcactttagcaagttcattccagagggttcccagagagtaggcttggttgcctcacagaagaatgatctggatgctgtggcactcctgcatcctgacgggagtgcagtggtggtagtactgaacaggtctagcaaagatgttcccttgactatcaaagacccagctgtgggctttctggaaaccatttcccctggatactctatccacacctatctctggagaagacagtaatga

SEQ ID NO: 402 - protein, 536 aa, synthetic construct
  REGION 1..536: note = Variant of B-Glucocerebrosidase
MEFSSPSREECPKPLSRVSIMAGSLTGLLLLQAVSWASGARPCIPKSFGYSSVVCVCNATYCDSFDPPTLPALGTFSRYESTRSGRRMELSMGPIQANHTGTSLLLTLQPEQKFQKVKGFGGAMTDAAALNILALSPPAQNLLLKSYFSEEGIGYNIIRVPMASCDFSIRTYTYADTPDDFQLHNFSLPEEDTKLKIPLIHRALQLSQRPVSLFASPWTSPTWLKTNGAVNGKGSLKGQPGDIYHQTWARYFVKFLDAYAEHKLQFWAVTAENEPSAGLLSGYPFQCLGFTPEHQRDFIARDLGPTLANSTHHNVRLLMLDDQRLLLPHWAKVVLTDPEAAKYVHGIAVHWYLDFLAPAKATLGETHRLFPNTMLFASEACVGSKFWEQSVRLGSWDRGMQYSHSIITNLLYHVVGWTDWNLALNPEGGPNWVRNFVDSPIIVDITKDTFYKQPMFYHLGHFSKFIPEGSQRVGLVASQKNDLDAVALLHPDGSAVVVVLNRSSKDVPLTIKDPAVGFLETISPGYSIHTYLWRRQ

SEQ ID NO: 403 - DNA, 1614 bp, synthetic construct
  misc_feature 1..1614: note = Variant of B-Glucocerebrosidase
  source 1..1614: mol_type = other DNA
atggagttttcttctcctagtagagaagaatgccccaagccactgagcagggtgagcatcatggctggatccctcacagggctgcttcttttgcaggcagtctcatgggcctctggagccaggccctgtattcccaagtcattcggctactcctcagtggtgtgtgtatgcaatgccacctattgtgacagtttcgatcctccaactctccctgctctgggtaccttctcccggtatgagagcacaagaagtggaagacgcatggagctctcaatgggccctatacaggctaaccacactgggacaggtctgctgctgaccctccaacctgaacagaagtttcagaaagtcaagggatttggaggagccatgactgatgcagcagcactcaacatcttggccctgtctccaccagcccagaatctgctgttgaagtcctacttctcagaggaggggattggctacaacatcatccgggttcccatggctagctgtgacttctccattaggacctatacatacgctgacacccccgatgattttcagctccataatttcagtctccctgaagaagacaccaaactgaagatacctctgattcacagagccttgcaactgtcccaaaggccagtgagcctcttcgcttctccctggactagtcctacatggctgaagactaatggtgctgttaatgggaaaggctccctgaaaggacagccaggtgacatatatcatcagacatgggcccgctactttgtgaaattccttgatgcctatgcagagcacaagctccaattctgggcagtcaccgcagaaaacgagccctcagctgggctgctgtctggctacccctttcagtgcttgggctttactcctgagcatcaacgggacttcattgcccgggatttggggccaacactggccaacagcacccaccacaatgtaagactcctcatgctggatgaccagaggctgctgctccctcattgggccaaggtggtgttgacagacccagaagctgccaaatatgttcatggcatcgctgtccactggtacctggattttttggcccctgcaaaggctactctgggagagacccacagactcttccccaataccatgctgtttgcatcagaagcctgcgtggggagcaaattctgggagcagtctgttaggctgggttcctgggatcggggcatgcaatattcccatagtataataactaacctcctctaccacgtggtaggatggacagactggaatctggctttgaacccagaaggaggccccaattgggtgcgcaactttgttgacagccccatcattgtggatatcacaaaggacaccttctacaaacagcctatgttctatcatctggggcactttagcaagttcattccagagggttcccagagagtaggcttggttgcctcacagaagaatgatctggatgctgtggcactcctgcatcctgacacgagtgcagtggtggtagtactgaacaggtctagcaaagatgttcccttgactatcaaagacccagctgtgggctttctggaaaccatttcccctggatactctatccacacctatctctggagaagacagtaatga

SEQ ID NO: 404 - protein, 536 aa, synthetic construct
  REGION 1..536: note = Variant of B-Glucocerebrosidase
MEFSSPSREECPKPLSRVSIMAGSLTGLLLLQAVSWASGARPCIPKSFGYSSVVCVCNATYCDSFDPPTLPALGTFSRYESTRSGRRMELSMGPIQANHTGTGLLLTLQPEQKFQKVKGFGGAMTDAAALNILALSPPAQNLLLKSYFSEEGIGYNIIRVPMASCDFSIRTYTYADTPDDFQLHNFSLPEEDTKLKIPLIHRALQLSQRPVSLFASPWTSPTWLKTNGAVNGKGSLKGQPGDIYHQTWARYFVKFLDAYAEHKLQFWAVTAENEPSAGLLSGYPFQCLGFTPEHQRDFIARDLGPTLANSTHHNVRLLMLDDQRLLLPHWAKVVLTDPEAAKYVHGIAVHWYLDFLAPAKATLGETHRLFPNTMLFASEACVGSKFWEQSVRLGSWDRGMQYSHSIITNLLYHVVGWTDWNLALNPEGGPNWVRNFVDSPIIVDITKDTFYKQPMFYHLGHFSKFIPEGSQRVGLVASQKNDLDAVALLHPDTSAVVVVLNRSSKDVPLTIKDPAVGFLETISPGYSIHTYLWRRQ

SEQ ID NO: 405 - DNA, 1614 bp, synthetic construct
  misc_feature 1..1614: note = Variant of B-Glucocerebrosidase
  source 1..1614: mol_type = other DNA
atggagttttcttctcctagtagagaagaatgccccaagccactgagcagggtgagcatcatggctggatccctcacagggctgcttcttttgcaggcagtctcatgggcctctggagccaggccctgtattcccaagtcattcggctactcctcagtggtgtgtgtatgcaatgccacctattgtgacagtttcgatcctccaactctccctgctctgggtaccttctcccggtatgagagcacaagaagtggaagacgcatggagctctcaatgggccctatacaggctaaccacactgggacaggtctgctgctgaccctccaacctgaacagaagtttcagaaagtcaagggatttggaggagccatgactgatgcagcagcactcaacatcttggccctgtctccaccagcccagaatctgctgttgaagtcctacttctcagaggaggggattggctacaacatcatccgggttcccatggctagctgtgacttctccattaggacctatacatacgctgacacccccgatgattttcagctccataatttcagtctccctgaagaagacaccaaactgaagatacctctgattcacagagccttgcaactgtcccaaaggccagtgagcctcttcgcttctccctggactagtcctacatggctgaagactaatggtgctgttaatgggaaaggctccctgaaaggacagccaggtgacatatatcatcagacatgggcccgctactttgtgaaattccttgatgcctatgcagagcacaagctccaattctgggcagtcaccgcagaaaacgagccctcagctgggctgctgtctggctacccctttcagtgcttgggctttactcctgagcatcaacgggacttcattgcccgggatttggggccaacactggccaacagcacccaccacaatgtaagactcctcatgctggatgaccagaggctgctgctccctcattgggccaaggtggtgttgacagacccagaagctgccaaatatgttcatggcatcgctgtccactggtacctggattttttggcccctgcaaaggctactctgggagagacccacagactcttccccaataccatgctgtttgcatcagaagcctgcgtggggagcaaattctgggagcagtctgttaggctgggttcctgggatcggggcatgcaatattcccatagtataataactaacctcctctaccacgtggtaggatggacagactggaatctggctttgaacccagaaggaggccccaattgggtgcgcaactttgttgacagccccatcattgtggatatcacaaaggacaccttctacaaacagcctatgttctatcatctggggcactttagcaagttcattccagagggttcccagagagtaggcttggttgcctcacagaagaatgatctggatgctgtggcactcactcatcctgacgggagtgcagtggtggtagtactgaacaggtctagcaaagatgttcccttgactatcaaagacccagctgtgggctttctggaaaccatttcccctggatactctatccacacctatctctggagaagacagtaatga

SEQ ID NO: 406 - protein, 536 aa, synthetic construct
  REGION 1..536: note = Variant of B-Glucocerebrosidase
MEFSSPSREECPKPLSRVSIMAGSLTGLLLLQAVSWASGARPCIPKSFGYSSVVCVCNATYCDSFDPPTLPALGTFSRYESTRSGRRMELSMGPIQANHTGTGLLLTLQPEQKFQKVKGFGGAMTDAAALNILALSPPAQNLLLKSYFSEEGIGYNIIRVPMASCDFSIRTYTYADTPDDFQLHNFSLPEEDTKLKIPLIHRALQLSQRPVSLFASPWTSPTWLKTNGAVNGKGSLKGQPGDIYHQTWARYFVKFLDAYAEHKLQFWAVTAENEPSAGLLSGYPFQCLGFTPEHQRDFIARDLGPTLANSTHHNVRLLMLDDQRLLLPHWAKVVLTDPEAAKYVHGIAVHWYLDFLAPAKATLGETHRLFPNTMLFASEACVGSKFWEQSVRLGSWDRGMQYSHSIITNLLYHVVGWTDWNLALNPEGGPNWVRNFVDSPIIVDITKDTFYKQPMFYHLGHFSKFIPEGSQRVGLVASQKNDLDAVALTHPDGSAVVVVLNRSSKDVPLTIKDPAVGFLETISPGYSIHTYLWRRQ

SEQ ID NO: 407 - DNA, 1614 bp, synthetic construct
  misc_feature 1..1614: note = Variant of B-Glucocerebrosidase
  source 1..1614: mol_type = other DNA
atggagttttcttctcctagtagagaagaatgccccaagccactgagcagggtgagcatcatggctggatccctcacagggctgcttcttttgcaggcagtctcatgggcctctggagccaggccctgtattcccaagtcattcggctactcctcagtggtgtgtgtatgcaatgccacctattgtgacagtttcgatcctccaactctccctgctctgggtaccttctcccggtatgagagcacaagaagtggaagacgcatggagctctcaatgggccctatacaggctaaccacactgggacaggtctgctgctgaccctccaacctgaacagaagtttcagaaagtcaagggatttggaggagccatgactgatgcagcagcactcaacatcttggccctgtctccaccagcccagaatctgctgttgaagtcctacttctcagaggaggggattggctacaacatcatccgggttcccatggctagctgtgacttctccattaggacctatacatacgctgacacccccgatgattttcagctccataatttcagtctccctgaagaagacaccaaactgaagatacctctgattcacagagccttgcaactgtcccaaaggccagtgagcctcttcgcttctccctggactagtcctacatggctgaagactaatggtgctgttaatgggaaaggctccctgaaaggacagccaggtgacatatatcatcagacatgggcccgctactttgtgaaattccttgatgcctatgcagagcacaagctccaattctgggcagtcaccgcagaaaacgagccctcagctgggctgctgtctggctacccctttcagtgcttgggctttactcctgagcatcaacgggacttcattgcccgggatttggggccaacactggccaacagcacccaccacaatgtaagactcctcatgctggatgaccagaggctgctgctccctcattgggccaaggtggtgttgacagacccagaagctgccaaatatgttcatggcatcgctgtccactggtacctggattttttggcccctgcaaaggctactctgggagagacccacagactcttccccaataccatgctgtttgcatcagaagcctgcgtggggagcaaattctgggagcagtctgttaggctgggttcctgggatcggggcatgcaatattcccatagtataataactaacctcctctaccacgtggtaggatggacagactggaatctggctttgaacccagaaggaggccccaattgggtgcgcaactttgttgacagccccatcattgtggatatcacaaaggacaccttctacaaacagcctatgttctatcatctggggcactttagcaagttcattccagagggttcccagagagtaggcttggttgcctcacagaagaatgatctggatgctgtggcactcctgcatcctgacgggagtgcagtggtggtagtactgaacaggtctagcaaagatgttcccttgactatcaaagacccagctgtgggcgtgctggaaaccatttcccctggatactctatccacacctatctctggagaagacagtaatga

SEQ ID NO: 408 - protein, 536 aa, synthetic construct
  REGION 1..536: note = Variant of B-Glucocerebrosidase
MEFSSPSREECPKPLSRVSIMAGSLTGLLLLQAVSWASGARPCIPKSFGYSSVVCVCNATYCDSFDPPTLPALGTFSRYESTRSGRRMELSMGPIQANHTGTGLLLTLQPEQKFQKVKGFGGAMTDAAALNILALSPPAQNLLLKSYFSEEGIGYNIIRVPMASCDFSIRTYTYADTPDDFQLHNFSLPEEDTKLKIPLIHRALQLSQRPVSLFASPWTSPTWLKTNGAVNGKGSLKGQPGDIYHQTWARYFVKFLDAYAEHKLQFWAVTAENEPSAGLLSGYPFQCLGFTPEHQRDFIARDLGPTLANSTHHNVRLLMLDDQRLLLPHWAKVVLTDPEAAKYVHGIAVHWYLDFLAPAKATLGETHRLFPNTMLFASEACVGSKFWEQSVRLGSWDRGMQYSHSIITNLLYHVVGWTDWNLALNPEGGPNWVRNFVDSPIIVDITKDTFYKQPMFYHLGHFSKFIPEGSQRVGLVASQKNDLDAVALLHPDGSAVVVVLNRSSKDVPLTIKDPAVGVLETISPGYSIHTYLWRRQ

SEQ ID NO: 409 - DNA, 1614 bp, synthetic construct
  misc_feature 1..1614: note = Variant of B-Glucocerebrosidase
  source 1..1614: mol_type = other DNA
atggagttttcttctcctagtagagaagaatgccccaagccactgagcagggtgagcatcatggctggatccctcacagggctgcttcttttgcaggcagtctcatgggcctctggagccaggccctgtattcccaagtcattcggctactcctcagtggtgtgtgtatgcaatgccacctattgtgacagtttcgatcctccaactctccctgctctgggtaccttctccctgtatgagagcacaagaagtggaagacgcatggagctctcaatgggccctatacaggctaaccacactgggacaggtctgctgctgaccctccaacctgaacagaagtttcagaaagtcaagggatttggaggagccatgactgatgcagcagcactcaacatcttggccctgtctccaccagcccagaatctgctgttgaagtcctacttctcagaggaggggattggctacaacatcatccgggttcccatggctagctgtgacttctccattaggacctatacatacgctgacacccccgatgattttcagctccataatttcagtctccctgaagaagacaccaaactgaagatacctctgattcacagagccttgcaactgtcccaaaggccagtgagcctcttcgcttctccctggactagtcctacatggctgaagactaatggtgctgttaatgggaaaggctccctgaaaggacagccaggtgacatatatcatcagacatgggcccgctactttgtgaaattccttgatgcctatgcagagcacaagctccaattctgggcagtcaccgcagaaaacgagccctcagctgggctgctgtctggctacccctttcagtgcttgggctttactcctgagcatcaacgggacttcattgcccgggatttggggccaacactggccaacagcacccaccacaatgtaagactcctcatgctggatgaccagaggctgctgctccctcattgggccaaggtggtgttgacagacccagaagctgccaaatatgttcatggcatcgctgtccactggtacctggattttttggcccctgcaaaggctactctgggagagacccacagactcttccccaataccatgctgtttgcatcagaagcctgcgtggggagcaaattctgggagcagtctgttaggctgggttcctgggatcggggcatgcaatattcccatagtataataactaacctcctctaccacgtggtaggatggacagactggaatctggctttgaacccagaaggaggccccaattgggtgcgcaactttgttgacagccccatcattgtggatatcacaaaggacaccttctacaaacagcctatgttctatcatctggggcactttagcaagttcattccagagggttcccagagagtaggcttggttgcctcacagaagaatgatctggatgctgtggcactcctgcatcctgacgggagtgcagtggtggtagtactgaacaggtctagcaaagatgttcccttgactatcaaagacccagctgtgggctttctggaaaccatttcccctggatactctatccacacctatctctggagaagacagtaatga

SEQ ID NO: 410 - protein, 536 aa, synthetic construct
  REGION 1..536: note = Variant of B-Glucocerebrosidase
MEFSSPSREECPKPLSRVSIMAGSLTGLLLLQAVSWASGARPCIPKSFGYSSVVCVCNATYCDSFDPPTLPALGTFSLYESTRSGRRMELSMGPIQANHTGTGLLLTLQPEQKFQKVKGFGGAMTDAAALNILALSPPAQNLLLKSYFSEEGIGYNIIRVPMASCDFSIRTYTYADTPDDFQLHNFSLPEEDTKLKIPLIHRALQLSQRPVSLFASPWTSPTWLKTNGAVNGKGSLKGQPGDIYHQTWARYFVKFLDAYAEHKLQFWAVTAENEPSAGLLSGYPFQCLGFTPEHQRDFIARDLGPTLANSTHHNVRLLMLDDQRLLLPHWAKVVLTDPEAAKYVHGIAVHWYLDFLAPAKATLGETHRLFPNTMLFASEACVGSKFWEQSVRLGSWDRGMQYSHSIITNLLYHVVGWTDWNLALNPEGGPNWVRNFVDSPIIVDITKDTFYKQPMFYHLGHFSKFIPEGSQRVGLVASQKNDLDAVALLHPDGSAVVVVLNRSSKDVPLTIKDPAVGFLETISPGYSIHTYLWRRQ

SEQ ID NO: 411 - DNA, 1614 bp, synthetic construct
  misc_feature 1..1614: note = Variant of B-Glucocerebrosidase
  source 1..1614: mol_type = other DNA
atggagttttcttctcctagtagagaagaatgccccaagccactgagcagggtgagcatcatggctggatccctcacagggctgcttcttttgcaggcagtctcatgggcctctggagccaggccctgtattcccaagtcattcggctactcctcagtggtgtgtgtatgcaatgccacctattgtgacagtttcgatcctccaactctccctgctctgggtaccttctcccggtatgagagcacaagaagtggaagacgcatggagctctcaatgggccctatacaggctaaccacactgggacaggtctgctgctgaccctccaacctgaacagaagtttcagaaagtcaagggatttggaggagccatgactgatgcagcagcactcaacatcttggccctgtctccaccagcccagaatctgctgttgaagtcctacttctcagaggaggggattggctacaacatcatccgggttcccatggctagctgtgacttctccattaggacctatacatacgctgacacccccgatgattttcagctccataatttcagtctccctgaagaagacaccaaatggaagatacctctgattcacagagccttgcaactgtcccaaaggccagtgagcctcttcgcttctccctggactagtcctacatggctgaagactaatggtgctgttaatgggaaaggctccctgaaaggacagccaggtgacatatatcatcagacatgggcccgctactttgtgaaattccttgatgcctatgcagagcacaagctccaattctgggcagtcaccgcagaaaacgagccctcagctgggctgctgtctggctacccctttcagtgcttgggctttactcctgagcatcaacgggacttcattgcccgggatttggggccaacactggccaacagcacccaccacaatgtaagactcctcatgctggatgaccagaggctgctgctccctcattgggccaaggtggtgttgacagacccagaagctgccaaatatgttcatggcatcgctgtccactggtacctggattttttggcccctgcaaaggctactctgggagagacccacagactcttccccaataccatgctgtttgcatcagaagcctgcgtggggagcaaattctgggagcagtctgttaggctgggttcctgggatcggggcatgcaatattcccatagtataataactaacctcctctaccacgtggtaggatggacagactggaatctggctttgaacccagaaggaggccccaattgggtgcgcaactttgttgacagccccatcattgtggatatcacaaaggacaccttctacaaacagcctatgttctatcatctggggcactttagcaagttcattccagagggttcccagagagtaggcttggttgcctcacagaagaatgatctggatgctgtggcactcctgcatcctgacgggagtgcagtggtggtagtactgaacaggtctagcaaagatgttcccttgactatcaaagacccagctgtgggctttctggaaaccatttcccctggatactctatccacacctatctctggagaagacagtaatga

SEQ ID NO: 412 - protein, 536 aa, synthetic construct
  REGION 1..536: note = Variant of B-Glucocerebrosidase
MEFSSPSREECPKPLSRVSIMAGSLTGLLLLQAVSWASGARPCIPKSFGYSSVVCVCNATYCDSFDPPTLPALGTFSRYESTRSGRRMELSMGPIQANHTGTGLLLTLQPEQKFQKVKGFGGAMTDAAALNILALSPPAQNLLLKSYFSEEGIGYNIIRVPMASCDFSIRTYTYADTPDDFQLHNFSLPEEDTKWKIPLIHRALQLSQRPVSLFASPWTSPTWLKTNGAVNGKGSLKGQPGDIYHQTWARYFVKFLDAYAEHKLQFWAVTAENEPSAGLLSGYPFQCLGFTPEHQRDFIARDLGPTLANSTHHNVRLLMLDDQRLLLPHWAKVVLTDPEAAKYVHGIAVHWYLDFLAPAKATLGETHRLFPNTMLFASEACVGSKFWEQSVRLGSWDRGMQYSHSIITNLLYHVVGWTDWNLALNPEGGPNWVRNFVDSPIIVDITKDTFYKQPMFYHLGHFSKFIPEGSQRVGLVASQKNDLDAVALLHPDGSAVVVVLNRSSKDVPLTIKDPAVGFLETISPGYSIHTYLWRRQ

SEQ ID NO: 413 - DNA, 1614 bp, synthetic construct
  misc_feature 1..1614: note = Variant of B-Glucocerebrosidase
  source 1..1614: mol_type = other DNA
atggagttttcttctcctagtagagaagaatgccccaagccactgagcagggtgagcatcatggctggatccctcacagggctgcttcttttgcaggcagtctcatgggcctctggagccaggccctgtattcccaagtcattcggctactcctcagtggtgtgtgtatgcaatgccacctattgtgacagtatggatcctccaactctccctgctctgggtaccttctcccggtatgagagcacaagaagtggaagacgcatggagctctcaatgggccctatacaggctaaccacactgggacaggtctgctgctgaccctccaacctgaacagaagtttcagaaagtcaagggatttggaggagccatgactgatgcagcagcactcaacatcttggccctgtctccaccagcccagaatctgctgttgaagtcctacttctcagaggaggggattggctacaacatcatccgggttcccatggctagctgtgacttctccattaggacctatacatacgctgacacccccgatgattttcagctccataatttcagtctccctgaagaagacaccaaactgaagatacctctgattcacagagccttgcaactgtcccaaaggccagtgagcctcttcgcttctccctggactagtcctacatggctgaagactaatggtgctgttaatgggaaaggctccctgaaaggacagccaggtgacatatatcatcagacatgggcccgctactttgtgaaattccttgatgcctatgcagagcacaagctccaattctgggcagtcaccgcagaaaacgagccctcagctgggctgctgtctggctacccctttcagtgcttgggctttactcctgagcatcaacgggacttcattgcccgggatttggggccaacactggccaacagcacccaccacaatgtaagactcctcatgctggatgaccagaggctgctgctccctcattgggccaaggtggtgttgacagacccagaagctgccaaatatgttcatggcatcgctgtccactggtacctggattttttggcccctgcaaaggctactctgggagagacccacagactcttccccaataccatgctgtttgcatcagaagcctgcgtggggagcaaattctgggagcagtctgttaggctgggttcctgggatcggggcatgcaatattcccatagtataataactaacctcctctaccacgtggtaggatggacagactggaatctggctttgaacccagaaggaggccccaattgggtgcgcaactttgttgacagccccatcattgtggatatcacaaaggacaccttctacaaacagcctatgttctatcatctggggcactttagcaagttcattccagagggttcccagagagtaggcttggttgcctcacagaagaatgatctggatgctgtggcactcctgcatcctgacgggagtgcagtggtggtagtactgaacaggtctagcaaagatgttcccttgactatcaaagacccagctgtgggctttctggaaaccatttcccctggatactctatccacacctatctctggagaagacagtaatga

SEQ ID NO: 414 - protein, 536 aa, synthetic construct
  REGION 1..536: note = Variant of B-Glucocerebrosidase
MEFSSPSREECPKPLSRVSIMAGSLTGLLLLQAVSWASGARPCIPKSFGYSSVVCVCNATYCDSMDPPTLPALGTFSRYESTRSGRRMELSMGPIQANHTGTGLLLTLQPEQKFQKVKGFGGAMTDAAALNILALSPPAQNLLLKSYFSEEGIGYNIIRVPMASCDFSIRTYTYADTPDDFQLHNFSLPEEDTKLKIPLIHRALQLSQRPVSLFASPWTSPTWLKTNGAVNGKGSLKGQPGDIYHQTWARYFVKFLDAYAEHKLQFWAVTAENEPSAGLLSGYPFQCLGFTPEHQRDFIARDLGPTLANSTHHNVRLLMLDDQRLLLPHWAKVVLTDPEAAKYVHGIAVHWYLDFLAPAKATLGETHRLFPNTMLFASEACVGSKFWEQSVRLGSWDRGMQYSHSIITNLLYHVVGWTDWNLALNPEGGPNWVRNFVDSPIIVDITKDTFYKQPMFYHLGHFSKFIPEGSQRVGLVASQKNDLDAVALLHPDGSAVVVVLNRSSKDVPLTIKDPAVGFLETISPGYSIHTYLWRRQ

SEQ ID NO: 415 - DNA, 1614 bp, synthetic construct
  misc_feature 1..1614: note = Variant of B-Glucocerebrosidase
  source 1..1614: mol_type = other DNA
atggagttttcttctcctagtagagaagaatgccccaagccactgagcagggtgagcatcatggctggatccctcacagggctgcttcttttgcaggcagtctcatgggcctctggagccaggccctgtattcccaagtcattcggctactcctcagtggtgtgtgtatgcaatgccacctattgtgacagtttcgatcctccaactctccctgctctgggtaccttctcccggtatgagagcacaagaagtggaagacgcatggagctctcaatgggccctatacaggctaaccacactgggacaggtctgctgctgaccctccaacctgaacagaagtttcagaaagtcaagggatttggaggagccatgactgatgcagcagcactcaacatcttggccctgtctccaccagcccagaatctgctgttgaagtcctacttctcagaggaggggattggctacaacatcatccgggttcccatggctagctgtgacttctccattaggacctatacatacgctgacacccccgatgattttcagctccataatttcagtctccctgaagaagacaccaaactgaagatacctctgattcacagagccttgcaactgtcccaaaggccagtgagcctcttcgcttctccctggactagtcctacatggctgaagactaatggtgctgttaatgggaaaggctccctgaaaggacagccaggtgacatatatcatcagacatgggcccgctactttgtgaaattccttgatgcctatgcagagcacaagctccaattctgggcagtcaccgcagaaaacgagccctcagctgggctgctgtctggctacccctttcagtgcttgggctttactcctgagcatcaacgggacttcattgcccgggatttggggccaacactggccaacagcacccaccacaatgtaagactcctcatgctggatgaccagaggctgctgctccctcattgggccaaggtggtgttgacagacccagaagctgccaaatatgttcatggcatcgctgtccactggtacctggattttttggcccctgcaaaggctactctgggagagacccacagactcttccccaataccatgctgtttgcatcagaagcctgcgtggggagcaaattctgggagcagtctgttaggctgggttcctgggatcggggcatgcaatattcccatagtataataactaacctcctctactgggtggtaggatggacagactggaatctggctttgaacccagaaggaggccccaattgggtgcgcaactttgttgacagccccatcattgtggatatcacaaaggacaccttctacaaacagcctatgttctatcatctggggcactttagcaagttcattccagagggttcccagagagtaggcttggttgcctcacagaagaatgatctggatgctgtggcactcctgcatcctgacgggagtgcagtggtggtagtactgaacaggtctagcaaagatgttcccttgactatcaaagacccagctgtgggctttctggaaaccatttcccctggatactctatccacacctatctctggagaagacagtaatga

SEQ ID NO: 416 - protein, 536 aa, synthetic construct
  REGION 1..536: note = Variant of B-Glucocerebrosidase
MEFSSPSREECPKPLSRVSIMAGSLTGLLLLQAVSWASGARPCIPKSFGYSSVVCVCNATYCDSFDPPTLPALGTFSRYESTRSGRRMELSMGPIQANHTGTGLLLTLQPEQKFQKVKGFGGAMTDAAALNILALSPPAQNLLLKSYFSEEGIGYNIIRVPMASCDFSIRTYTYADTPDDFQLHNFSLPEEDTKLKIPLIHRALQLSQRPVSLFASPWTSPTWLKTNGAVNGKGSLKGQPGDIYHQTWARYFVKFLDAYAEHKLQFWAVTAENEPSAGLLSGYPFQCLGFTPEHQRDFIARDLGPTLANSTHHNVRLLMLDDQRLLLPHWAKVVLTDPEAAKYVHGIAVHWYLDFLAPAKATLGETHRLFPNTMLFASEACVGSKFWEQSVRLGSWDRGMQYSHSIITNLLYWVVGWTDWNLALNPEGGPNWVRNFVDSPIIVDITKDTFYKQPMFYHLGHFSKFIPEGSQRVGLVASQKNDLDAVALLHPDGSAVVVVLNRSSKDVPLTIKDPAVGFLETISPGYSIHTYLWRRQ

SEQ ID NO: 417 - DNA, 1614 bp, synthetic construct
  misc_feature 1..1614: note = Variant of B-Glucocerebrosidase
  source 1..1614: mol_type = other DNA
atggagttttcttctcctagtagagaagaatgccccaagccactgagcagggtgagcatcatggctggatccctcacagggctgcttcttttgcaggcagtctcatgggcctctggagccaggccctgtattcccaagtcattcggctactcctcagtggtgtgtgtatgcaatgccacctattgtgacagtttcgatcctccaactctccctgctctgggtaccttctcccggtatgagagcacaagaagtggaagacgcatggagctctcaatgggccctatacaggctaaccacactgggacaggtctgctgctgaccctccaacctgaacagaagtttcagaaagtcaagggatttggaggagccatgactgatgcagcagcactcaacatcttggccctgtctccaccagcccagaatctgctgttgaagtcctacttctcagaggaggggattggctacaacatcatccgggttcccatggctagctgtgacttctccattaggacctatacatacgctgacacccccgatgattttcagctccataatttcagtctccctgaagaagacaccaaactgaagatacctctgattcacagagccttgcaactgtcccaaaggccagtgagcctcttcgcttctccctggactagtcctacatggctgaagactaatggtgctgttaatgggaaaggctccctgaaaggacagccaggtgacatatatcatcagacatgggcccgctactttgtgaaattccttgatgcctatgcagagcacaagctccaattctgggcagtcaccgcagaaaacgagccctcagctgggctgctgtctggctacccctttcagtgcttgggctttactcctgagcatcaacgggacttcattgcccgggatttggggccaacactggccaacagcacccaccacaatgtaagactcctcatgctggatgaccagaggctgctgctccctcattgggccaaggtggtgatgacagacccagaagctgccaaatatgttcatggcatcgctgtccactggtacctggattttttggcccctgcaaaggctactctgggagagacccacagactcttccccaataccatgctgtttgcatcagaagcctgcgtggggagcaaattctgggagcagtctgttaggctgggttcctgggatcggggcatgcaatattcccatagtataataactaacctcctctaccacgtggtaggatggacagactggaatctggctttgaacccagaaggaggccccaattgggtgcgcaactttgttgacagccccatcattgtggatatcacaaaggacaccttctacaaacagcctatgttctatcatctggggcactttagcaagttcattccagagggttcccagagagtaggcttggttgcctcacagaagaatgatctggatgctgtggcactcctgcatcctgacgggagtgcagtggtggtagtactgaacaggtctagcaaagatgttcccttgactatcaaagacccagctgtgggctttctggaaaccatttcccctggatactctatccacacctatctctggagaagacagtaatga

SEQ ID NO: 418 - protein, 536 aa, synthetic construct
  REGION 1..536: note = Variant of B-Glucocerebrosidase
MEFSSPSREECPKPLSRVSIMAGSLTGLLLLQAVSWASGARPCIPKSFGYSSVVCVCNATYCDSFDPPTLPALGTFSRYESTRSGRRMELSMGPIQANHTGTGLLLTLQPEQKFQKVKGFGGAMTDAAALNILALSPPAQNLLLKSYFSEEGIGYNIIRVPMASCDFSIRTYTYADTPDDFQLHNFSLPEEDTKLKIPLIHRALQLSQRPVSLFASPWTSPTWLKTNGAVNGKGSLKGQPGDIYHQTWARYFVKFLDAYAEHKLQFWAVTAENEPSAGLLSGYPFQCLGFTPEHQRDFIARDLGPTLANSTHHNVRLLMLDDQRLLLPHWAKVVMTDPEAAKYVHGIAVHWYLDFLAPAKATLGETHRLFPNTMLFASEACVGSKFWEQSVRLGSWDRGMQYSHSIITNLLYHVVGWTDWNLALNPEGGPNWVRNFVDSPIIVDITKDTFYKQPMFYHLGHFSKFIPEGSQRVGLVASQKNDLDAVALLHPDGSAVVVVLNRSSKDVPLTIKDPAVGFLETISPGYSIHTYLWRRQ

SEQ ID NO: 419 - DNA, 1614 bp, synthetic construct
  misc_feature 1..1614: note = Variant of B-Glucocerebrosidase
  source 1..1614: mol_type = other DNA
atggagttttcttctcctagtagagaagaatgccccaagccactgagcagggtgagcatcatggctggatccctcacagggctgcttcttttgcaggcagtctcatgggcctctggagccaggccctgtattcccaagtcattcggctactcctcagtggtgtgtgtatgcaatgccacctattgtgacagtttcgatcctccaactctccctgctctgggtaccttctcccggtatgagagcacaagaagtggaagacgcatggagctctcaatgggccctatacaggctaaccacactgggacaggtctgctgctgaccctccaacctgaacagaagtttcagaaagtcaagggatttggaggagccatgactgatgcagcagcactcaacatcttggccctgtctccaccagcccagaatctgctgttgaagtcctacttctcagaggaggggattggctacaacatcatccgggttcccatggctagctgtgacttctccattaggacctatacatacgctgacacccccgatgattttcagctccataatttcagtctccctgaagaagacaccaaactgaagatacctctgattcacagagccttgcaactgtcccaaaggccagtgagcctcttcgcttctccctggactagtcctacatggctgaagactaatggtgctgttaatgggaaaggctccctgaaaggacagccaggtgacatatatcatcagacatgggcccgctactttgtgaaattccttgatgcctatgcagagcacaagctccaattctgggcagtcaccgcagaaaacgagccctcagctgggctgctgtctggctacccctttcagtgcttgggctttactcctgagcatcaacgggacttcattgcccgggatttggggccaacactggccaacagcacccaccacaatgtaagactcctcatgctggatgaccagaggctgctgctccctcattgggccaaggtggtgttgacagacccagaagctgccaaatatgttcatggcatcgctgtccactggtacctggattttttggcccctgcaaaggctactctgggagagacccacagactcttccccaataccatgctgtttgcatcagaagcctgcgtggggagcaaattctgggagcagtctgttaggctgggttcctgggatcggggcatgcaatattcccatagtataataactaacctcctctaccacgtggtaggatggacagactggaatctggctttgaacccagaaggaggccccaattgggtgcgcaactttgttgacagccccatcattgtggatatcacaaaggacaccttctacaaacagcctatgttctatcatctggggcactttagcaagttcattccagagggttcccagagagtaggcttggttgcctcacagaagaatgatctggatgctgtggcactcctgcatcctgacgggagtgcagtggtggtagtactgaacaggtctagcaaagatgttcccttgactatcaaagacccagctgtgggctttctgaagaccatttcccctggatactctatccacacctatctctggagaagacagtaatga

SEQ ID NO: 420 - protein, 536 aa, synthetic construct
  REGION 1..536: note = Variant of B-Glucocerebrosidase
MEFSSPSREECPKPLSRVSIMAGSLTGLLLLQAVSWASGARPCIPKSFGYSSVVCVCNATYCDSFDPPTLPALGTFSRYESTRSGRRMELSMGPIQANHTGTGLLLTLQPEQKFQKVKGFGGAMTDAAALNILALSPPAQNLLLKSYFSEEGIGYNIIRVPMASCDFSIRTYTYADTPDDFQLHNFSLPEEDTKLKIPLIHRALQLSQRPVSLFASPWTSPTWLKTNGAVNGKGSLKGQPGDIYHQTWARYFVKFLDAYAEHKLQFWAVTAENEPSAGLLSGYPFQCLGFTPEHQRDFIARDLGPTLANSTHHNVRLLMLDDQRLLLPHWAKVVLTDPEAAKYVHGIAVHWYLDFLAPAKATLGETHRLFPNTMLFASEACVGSKFWEQSVRLGSWDRGMQYSHSIITNLLYHVVGWTDWNLALNPEGGPNWVRNFVDSPIIVDITKDTFYKQPMFYHLGHFSKFIPEGSQRVGLVASQKNDLDAVALLHPDGSAVVVVLNRSSKDVPLTIKDPAVGFLKTISPGYSIHTYLWRRQ

SEQ ID NO: 421 - DNA, 1614 bp, synthetic construct
  misc_feature 1..1614: note = Variant of B-Glucocerebrosidase
  source 1..1614: mol_type = other DNA
atggagttttcttctcctagtagagaagaatgccccaagccactgagcagggtgagcatcatggctggatccctcacagggctgcttcttttgcaggcagtctcatgggcctctggagccaggccctgtattcccaagtcattcggctactcctcagtggtgtgtgtatgcaatgccacctattgtgacagtttcgatcctccaactctccctgctctgggtaccttctcccggtatgagagcacaagaagtggaagacgcatggagctctcaatgggccctatacaggctaaccacactgggacaggtctgctgctggagctccaacctgaacagaagtttcagaaagtcaagggatttggaggagccatgactgatgcagcagcactcaacatcttggccctgtctccaccagcccagaatctgctgttgaagtcctacttctcagaggaggggattggctacaacatcatccgggttcccatggctagctgtgacttctccattaggacctatacatacgctgacacccccgatgattttcagctccataatttcagtctccctgaagaagacaccaaactgaagatacctctgattcacagagccttgcaactgtcccaaaggccagtgagcctcttcgcttctccctggactagtcctacatggctgaagactaatggtgctgttaatgggaaaggctccctgaaaggacagccaggtgacatatatcatcagacatgggcccgctactttgtgaaattccttgatgcctatgcagagcacaagctccaattctgggcagtcaccgcagaaaacgagccctcagctgggctgctgtctggctacccctttcagtgcttgggctttactcctgagcatcaacgggacttcattgcccgggatttggggccaacactggccaacagcacccaccacaatgtaagactcctcatgctggatgaccagaggctgctgctccctcattgggccaaggtggtgttgacagacccagaagctgccaaatatgttcatggcatcgctgtccactggtacctggattttttggcccctgcaaaggctactctgggagagacccacagactcttccccaataccatgctgtttgcatcagaagcctgcgtggggagcaaattctgggagcagtctgttaggctgggttcctgggatcggggcatgcaatattcccatagtataataactaacctcctctaccacgtggtaggatggacagactggaatctggctttgaacccagaaggaggccccaattgggtgcgcaactttgttgacagccccatcattgtggatatcacaaaggacaccttctacaaacagcctatgttctatcatctggggcactttagcaagttcattccagagggttcccagagagtaggcttggttgcctcacagaagaatgatctggatgctgtggcactcctgcatcctgacgggagtgcagtggtggtagtactgaacaggtctagcaaagatgttcccttgactatcaaagacccagctgtgggctttctggaaaccatttcccctggatactctatccacacctatctctggagaagacagtaatga

SEQ ID NO: 422 - protein, 536 aa, synthetic construct
  REGION 1..536: note = Variant of B-Glucocerebrosidase
MEFSSPSREECPKPLSRVSIMAGSLTGLLLLQAVSWASGARPCIPKSFGYSSVVCVCNATYCDSFDPPTLPALGTFSRYESTRSGRRMELSMGPIQANHTGTGLLLELQPEQKFQKVKGFGGAMTDAAALNILALSPPAQNLLLKSYFSEEGIGYNIIRVPMASCDFSIRTYTYADTPDDFQLHNFSLPEEDTKLKIPLIHRALQLSQRPVSLFASPWTSPTWLKTNGAVNGKGSLKGQPGDIYHQTWARYFVKFLDAYAEHKLQFWAVTAENEPSAGLLSGYPFQCLGFTPEHQRDFIARDLGPTLANSTHHNVRLLMLDDQRLLLPHWAKVVLTDPEAAKYVHGIAVHWYLDFLAPAKATLGETHRLFPNTMLFASEACVGSKFWEQSVRLGSWDRGMQYSHSIITNLLYHVVGWTDWNLALNPEGGPNWVRNFVDSPIIVDITKDTFYKQPMFYHLGHFSKFIPEGSQRVGLVASQKNDLDAVALLHPDGSAVVVVLNRSSKDVPLTIKDPAVGFLETISPGYSIHTYLWRRQ

SEQ ID NO: 423 - DNA, 1614 bp, synthetic construct
  misc_feature 1..1614: note = Variant of B-Glucocerebrosidase
  source 1..1614: mol_type = other DNA
atggagttttcttctcctagtagagaagaatgccccaagccactgagcagggtgagcatcatggctggatccctcacagggctgcttcttttgcaggcagtctcatgggcctctggagccaggccctgtattcccaagtcattcggctactcctcagtggtgtgtgtatgcaatgccacctattgtgacagtttcgatcctccaactctccctgctctgggtaccttctcccggtatgagagcacaagaagtggaagacgcatggagctctcaatgggccctatacaggctaaccacactcagacaggtctgctgctgaccctccaacctgaacagaagtttcagaaagtcaagggatttggaggagccatgactgatgcagcagcactcaacatcttggccctgtctccaccagcccagaatctgctgttgaagtcctacttctcagaggaggggattggctacaacatcatccgggttcccatggctagctgtgacttctccattaggacctatacatacgctgacacccccgatgattttcagctccataatttcagtctccctgaagaagacaccaaactgaagatacctctgattcacagagccttgcaactgtcccaaaggccagtgagcctcttcgcttctccctggactagtcctacatggctgaagactaatggtgctgttaatgggaaaggctccctgaaaggacagccaggtgacatatatcatcagacatgggcccgctactttgtgaaattccttgatgcctatgcagagcacaagctccaattctgggcagtcaccgcagaaaacgagccctcagctgggctgctgtctggctacccctttcagtgcttgggctttactcctgagcatcaacgggacttcattgcccgggatttggggccaacactggccaacagcacccaccacaatgtaagactcctcatgctggatgaccagaggctgctgctccctcattgggccaaggtggtgttgacagacccagaagctgccaaatatgttcatggcatcgctgtccactggtacctggattttttggcccctgcaaaggctactctgggagagacccacagactcttccccaataccatgctgtttgcatcagaagcctgcgtggggagcaaattctgggagcagtctgttaggctgggttcctgggatcggggcatgcaatattcccatagtataataactaacctcctctaccacgtggtaggatggacagactggaatctggctttgaacccagaaggaggccccaattgggtgcgcaactttgttgacagccccatcattgtggatatcacaaaggacaccttctacaaacagcctatgttctatcatctggggcactttagcaagttcattccagagggttcccagagagtaggcttggttgcctcacagaagaatgatctggatgctgtggcactcctgcatcctgacgggagtgcagtggtggtagtactgaacaggtctagcaaagatgttcccttgactatcaaagacccagctgtgggctttctggaaaccatttcccctggatactctatccacacctatctctggagaagacagtaatga

SEQ ID NO: 424 - protein, 536 aa, synthetic construct
  REGION 1..536: note = Variant of B-Glucocerebrosidase
MEFSSPSREECPKPLSRVSIMAGSLTGLLLLQAVSWASGARPCIPKSFGYSSVVCVCNATYCDSFDPPTLPALGTFSRYESTRSGRRMELSMGPIQANHTQTGLLLTLQPEQKFQKVKGFGGAMTDAAALNILALSPPAQNLLLKSYFSEEGIGYNIIRVPMASCDFSIRTYTYADTPDDFQLHNFSLPEEDTKLKIPLIHRALQLSQRPVSLFASPWTSPTWLKTNGAVNGKGSLKGQPGDIYHQTWARYFVKFLDAYAEHKLQFWAVTAENEPSAGLLSGYPFQCLGFTPEHQRDFIARDLGPTLANSTHHNVRLLMLDDQRLLLPHWAKVVLTDPEAAKYVHGIAVHWYLDFLAPAKATLGETHRLFPNTMLFASEACVGSKFWEQSVRLGSWDRGMQYSHSIITNLLYHVVGWTDWNLALNPEGGPNWVRNFVDSPIIVDITKDTFYKQPMFYHLGHFSKFIPEGSQRVGLVASQKNDLDAVALLHPDGSAVVVVLNRSSKDVPLTIKDPAVGFLETISPGYSIHTYLWRRQ

SEQ ID NO: 425 - DNA, 1614 bp, synthetic construct
  misc_feature 1..1614: note = Variant of B-Glucocerebrosidase
  source 1..1614: mol_type = other DNA
atggagttttcttctcctagtagagaagaatgccccaagccactgagcagggtgagcatcatggctggatccctcacagggctgcttcttttgcaggcagtctcatgggcctctggagccaggccctgtattcccaagtcattcggctactcctcagtggtgtgtgtatgcaatgccacctattgtgacagtttcgatcctccaactctccctgctctgggtaccttctcccggtatgagagcacaagaagtggaagacgcatggagctctcaatgggccctatacaggctaaccacactgggacaggtctgctgctgaccctccaacctgaacagaagtttcagaaagtcaagggatttggaggagccatgactgatgcagcagcactcaacatcttggccctgtctccaccagcccagaatctgctgttgaagtcctacttctcagaggaggggattggctacaacatcatccgggttcccatggctagctgtgacttctccattaggacctatacatacgctgacacccccgatgattttcagctccataatttcagtctccctgaagaagacaccaaactgaagatacctctgattcacagagccttgcaactgtcccaaaggccagtgagcctcttcgcttctccctggactagtcctacatggctgaagactaatggtgctgttaatgggaaaggctccctgaaaggacagccaggtgacatatatcatcagacatgggcccgctactttgtgaaattccttgatgcctatgcagagcacaagctccaattctgggcagtcaccgcagaaaacgagccctcagctgggctgctgtctggctacccctttcagtgcttgggctttactcctgagcatcaacgggacttcattgcccgggatttggggccaacactggccaacagcacccaccacaatgtaagactcctcatgctggatgaccagaggctgctgctccctcattgggccaaggtggtgttgacagacccagaagctgccaaatatgttcatggcatcgctgtccactggtacctggattttttggcccctgcaaaggctactctgggagagacccacagactcttccccaataccatgctgtttgcatcagaagcctgcgtggggagcaaattctgggagcagtctgttaggctgggttcctgggatcggggcatgcaatattcccatagtataataactaacctcctctaccacgtggtaggatggacagactggaatctggctttgaacccagaaggaggccccaattgggtgcgcaactttgttgacagccccatcattgtggatatcacaaaggacaagttctacaaacagcctatgttctatcatctggggcactttagcaagttcattccagagggttcccagagagtaggcttggttgcctcacagaagaatgatctggatgctgtggcactcctgcatcctgacgggagtgcagtggtggtagtactgaacaggtctagcaaagatgttcccttgactatcaaagacccagctgtgggctttctggaaaccatttcccctggatactctatccacacctatctctggagaagacagtaatga

SEQ ID NO: 426 - protein, 536 aa, synthetic construct
  REGION 1..536: note = Variant of B-Glucocerebrosidase
MEFSSPSREECPKPLSRVSIMAGSLTGLLLLQAVSWASGARPCIPKSFGYSSVVCVCNATYCDSFDPPTLPALGTFSRYESTRSGRRMELSMGPIQANHTGTGLLLTLQPEQKFQKVKGFGGAMTDAAALNILALSPPAQNLLLKSYFSEEGIGYNIIRVPMASCDFSIRTYTYADTPDDFQLHNFSLPEEDTKLKIPLIHRALQLSQRPVSLFASPWTSPTWLKTNGAVNGKGSLKGQPGDIYHQTWARYFVKFLDAYAEHKLQFWAVTAENEPSAGLLSGYPFQCLGFTPEHQRDFIARDLGPTLANSTHHNVRLLMLDDQRLLLPHWAKVVLTDPEAAKYVHGIAVHWYLDFLAPAKATLGETHRLFPNTMLFASEACVGSKFWEQSVRLGSWDRGMQYSHSIITNLLYHVVGWTDWNLALNPEGGPNWVRNFVDSPIIVDITKDKFYKQPMFYHLGHFSKFIPEGSQRVGLVASQKNDLDAVALLHPDGSAVVVVLNRSSKDVPLTIKDPAVGFLETISPGYSIHTYLWRRQ

SEQ ID NO: 427 - DNA, 1614 bp, synthetic construct
  misc_feature 1..1614: note = Variant of B-Glucocerebrosidase
  source 1..1614: mol_type = other DNA
atggagttttcttctcctagtagagaagaatgccccaagccactgagcagggtgagcatcatggctggatccctcacagggctgcttcttttgcaggcagtctcatgggcctctggagccaggccctgtattcccaagtcattcggctactcctcagtggtgtgtgtatgcaatgccacctattgtgacagtttcgatcctccaactctccctgctctgggtaccttctcccggtatgagagcacaagaagtggaagacgcatggagctctcaatgggccctatacaggctaaccacactgggacaggtctgctgctgaccctccaacctgaacagaagtttcagaaagtcaagggatttggaggagccatgactgatgcagcagcactcaacatcttggccctgtctccaccagcccagaatctgctgttgaagtcctacttctcagaggaggggattggctacaacatcatccgggttcccatggctagctgtgacttctccattaggacctatacatacgctgacacccccgatgattttcagctccataatttcagtctccctgaagaagacaccaaactgaagatacctctgattcacagagccttgcaactgtcccaaaggccagtgagcctcttcgcttctccctggactagtcctacatggctgaagactaatggtgctgttaatgggaaaggctccctgaaaggacagccaggtgacatatatcatcagacatgggcccgctactttgtgaaattccttgatgcctatgcagagcacaagctccaattctgggcagtcaccgcagaaaacgagccctcagctgggctgctgtctggctacccctttcagtgcttgggctttactcctgagcatcaacgggacttcattgcccgggatttggggccaacactggccaacagcacccaccacaatgtaagactcctcatgctggatgaccagaggctgctgctccctcattgggccaaggtggtgttgacagacccagaagctgccaaatatgttcatggcatcgctgtccactggtacctggattttttggcccctgcaaaggctactctgggagagacccacagactcttccccaataccatgctgtttgcatcagaagcctgcgtggggagcaaattctgggagcagtctgttaggctgggttcctgggatcggggcatgcaatattcccatagtataataactaacctcctctaccacgtggtaggatggacagactggaatctggctttgaacccagaaggaggccccaattgggtgcgcaactttgttgacagccccatcattgtggatatcacaaaggacaccttctacaaacagcctatgttctatcatctggggcactttagcaagttcattccagagggttcccagagagtaggcttggttgcctcacagaagaaggatctggatgctgtggcactcctgcatcctgacgggagtgcagtggtggtagtactgaacaggtctagcaaagatgttcccttgactatcaaagacccagctgtgggctttctggaaaccatttcccctggatactctatccacacctatctctggagaagacagtaatga

SEQ ID NO: 428 - protein, 536 aa, synthetic construct
  REGION 1..536: note = Variant of B-Glucocerebrosidase
MEFSSPSREECPKPLSRVSIMAGSLTGLLLLQAVSWASGARPCIPKSFGYSSVVCVCNATYCDSFDPPTLPALGTFSRYESTRSGRRMELSMGPIQANHTGTGLLLTLQPEQKFQKVKGFGGAMTDAAALNILALSPPAQNLLLKSYFSEEGIGYNIIRVPMASCDFSIRTYTYADTPDDFQLHNFSLPEEDTKLKIPLIHRALQLSQRPVSLFASPWTSPTWLKTNGAVNGKGSLKGQPGDIYHQTWARYFVKFLDAYAEHKLQFWAVTAENEPSAGLLSGYPFQCLGFTPEHQRDFIARDLGPTLANSTHHNVRLLMLDDQRLLLPHWAKVVLTDPEAAKYVHGIAVHWYLDFLAPAKATLGETHRLFPNTMLFASEACVGSKFWEQSVRLGSWDRGMQYSHSIITNLLYHVVGWTDWNLALNPEGGPNWVRNFVDSPIIVDITKDTFYKQPMFYHLGHFSKFIPEGSQRVGLVASQKKDLDAVALLHPDGSAVVVVLNRSSKDVPLTIKDPAVGFLETISPGYSIHTYLWRRQ

SEQ ID NO: 429 - DNA, 1614 bp, synthetic construct
  misc_feature 1..1614: note = Variant of B-Glucocerebrosidase
  source 1..1614: mol_type = other DNA
atggagttttcttctcctagtagagaagaatgccccaagccactgagcagggtgagcatcatggctggatccctcacagggctgcttcttttgcaggcagtctcatgggcctctggagccaggccctgtattcccaagtcattcggctactcctcagtggtgtgtgtatgcaatgccacctattgtgacagtttcgatcctccaactctccctgctctgggtaccttctcccggtatgagagcacaagaagtggaagacgcatggagctctcaatgggccctatacaggctaaccacactgggacaggtgtgctgctgaccctccaacctgaacagaagtttcagaaagtcaagggatttggaggagccatgactgatgcagcagcactcaacatcttggccctgtctccaccagcccagaatctgctgttgaagtcctacttctcagaggaggggattggctacaacatcatccgggttcccatggctagctgtgacttctccattaggacctatacatacgctgacacccccgatgattttcagctccataatttcagtctccctgaagaagacaccaaactgaagatacctctgattcacagagccttgcaactgtcccaaaggccagtgagcctcttcgcttctccctggactagtcctacatggctgaagactaatggtgctgttaatgggaaaggctccctgaaaggacagccaggtgacatatatcatcagacatgggcccgctactttgtgaaattccttgatgcctatgcagagcacaagctccaattctgggcagtcaccgcagaaaacgagccctcagctgggctgctgtctggctacccctttcagtgcttgggctttactcctgagcatcaacgggacttcattgcccgggatttggggccaacactggccaacagcacccaccacaatgtaagactcctcatgctggatgaccagaggctgctgctccctcattgggccaaggtggtgttgacagacccagaagctgccaaatatgttcatggcatcgctgtccactggtacctggattttttggcccctgcaaaggctactctgggagagacccacagactcttccccaataccatgctgtttgcatcagaagcctgcgtggggagcaaattctgggagcagtctgttaggctgggttcctgggatcggggcatgcaatattcccatagtataataactaacctcctctaccacgtggtaggatggacagactggaatctggctttgaacccagaaggaggccccaattgggtgcgcaactttgttgacagccccatcattgtggatatcacaaaggacaccttctacaaacagcctatgttctatcatctggggcactttagcaagttcattccagagggttcccagagagtaggcttggttgcctcacagaagaatgatctggatgctgtggcactcctgcatcctgacgggagtgcagtggtggtagtactgaacaggtctagcaaagatgttcccttgactatcaaagacccagctgtgggctttctggaaaccatttcccctggatactctatccacacctatctctggagaagacagtaatga

SEQ ID NO: 430 - protein, 536 aa, synthetic construct
  REGION 1..536: note = Variant of B-Glucocerebrosidase
MEFSSPSREECPKPLSRVSIMAGSLTGLLLLQAVSWASGARPCIPKSFGYSSVVCVCNATYCDSFDPPTLPALGTFSRYESTRSGRRMELSMGPIQANHTGTGVLLTLQPEQKFQKVKGFGGAMTDAAALNILALSPPAQNLLLKSYFSEEGIGYNIIRVPMASCDFSIRTYTYADTPDDFQLHNFSLPEEDTKLKIPLIHRALQLSQRPVSLFASPWTSPTWLKTNGAVNGKGSLKGQPGDIYHQTWARYFVKFLDAYAEHKLQFWAVTAENEPSAGLLSGYPFQCLGFTPEHQRDFIARDLGPTLANSTHHNVRLLMLDDQRLLLPHWAKVVLTDPEAAKYVHGIAVHWYLDFLAPAKATLGETHRLFPNTMLFASEACVGSKFWEQSVRLGSWDRGMQYSHSIITNLLYHVVGWTDWNLALNPEGGPNWVRNFVDSPIIVDITKDTFYKQPMFYHLGHFSKFIPEGSQRVGLVASQKNDLDAVALLHPDGSAVVVVLNRSSKDVPLTIKDPAVGFLETISPGYSIHTYLWRRQ

SEQ ID NO: 431 - DNA, 1614 bp, synthetic construct
  misc_feature 1..1614: note = Variant of B-Glucocerebrosidase
  source 1..1614: mol_type = other DNA
atggagttttcttctcctagtagagaagaatgccccaagccactgagcagggtgagcatcatggctggatccctcacagggctgcttcttttgcaggcagtctcatgggcctctggagccaggccctgtattcccaagtcattcggctactcctcagtggtgtgtgtatgcaatgccacctattgtgacagtttcgatcctccaactctccctgctctgggtaccttctcccggtatgagagcacaagaagtggaagacgcatggagctctcaatgggccctatacaggctaaccacactgggacaggtctgctgctgaccctccaacctgaacagaagtttcagaaagtcaagggatttggaggagccatgactgatgcagcagcactcaacatcttggccctgtctccaccagcccagaatctgctgttgaagtcctacttctcagaggaggggattggctacaacatcatccgggttcccatggctagctgtgacttctccattaggacctatacatacgctgacacccccgatgattttcagctccataatttcagtctccctgaagaagacaccaaactgaagatacctctgattcacagagccttgcaactgtcccaaaggccagtgagcctcttcgcttctccctggactagtcctacatggctgaagactaatggtgctgttaatgggaaaggctccctgaaaggacagccaggtgacatatatcatcagacatgggcccgctactttgtgaaattccttgatgcctatgcagagcacaagctccaattctgggcagtcaccgcagaaaacgagccctcagctgggctgctgtctggctacccctttcagtgcttgggctttactcctgagcatcaacgggacttcattgcccgggatttggggccaacactggccaacagcacccaccacaatgtaagactcctcatgctggatgaccagaggctgctgctccctcattgggccaaggtggtgttgacagacccagaagctaggaaatatgttcatggcatcgctgtccactggtacctggattttttggcccctgcaaaggctactctgggagagacccacagactcttccccaataccatgctgtttgcatcagaagcctgcgtggggagcaaattctgggagcagtctgttaggctgggttcctgggatcggggcatgcaatattcccatagtataataactaacctcctctaccacgtggtaggatggacagactggaatctggctttgaacccagaaggaggccccaattgggtgcgcaactttgttgacagccccatcattgtggatatcacaaaggacaccttctacaaacagcctatgttctatcatctggggcactttagcaagttcattccagagggttcccagagagtaggcttggttgcctcacagaagaatgatctggatgctgtggcactcctgcatcctgacgggagtgcagtggtggtagtactgaacaggtctagcaaagatgttcccttgactatcaaagacccagctgtgggctttctggaaaccatttcccctggatactctatccacacctatctctggagaagacagtaatga

SEQ ID NO: 432 - protein, 536 aa, synthetic construct
  REGION 1..536: note = Variant of B-Glucocerebrosidase
MEFSSPSREECPKPLSRVSIMAGSLTGLLLLQAVSWASGARPCIPKSFGYSSVVCVCNATYCDSFDPPTLPALGTFSRYESTRSGRRMELSMGPIQANHTGTGLLLTLQPEQKFQKVKGFGGAMTDAAALNILALSPPAQNLLLKSYFSEEGIGYNIIRVPMASCDFSIRTYTYADTPDDFQLHNFSLPEEDTKLKIPLIHRALQLSQRPVSLFASPWTSPTWLKTNGAVNGKGSLKGQPGDIYHQTWARYFVKFLDAYAEHKLQFWAVTAENEPSAGLLSGYPFQCLGFTPEHQRDFIARDLGPTLANSTHHNVRLLMLDDQRLLLPHWAKVVLTDPEARKYVHGIAVHWYLDFLAPAKATLGETHRLFPNTMLFASEACVGSKFWEQSVRLGSWDRGMQYSHSIITNLLYHVVGWTDWNLALNPEGGPNWVRNFVDSPIIVDITKDTFYKQPMFYHLGHFSKFIPEGSQRVGLVASQKNDLDAVALLHPDGSAVVVVLNRSSKDVPLTIKDPAVGFLETISPGYSIHTYLWRRQ

SEQ ID NO: 433 - DNA, 1614 bp, synthetic construct
  misc_feature 1..1614: note = Variant of B-Glucocerebrosidase
  source 1..1614: mol_type = other DNA
atggagttttcttctcctagtagagaagaatgccccaagccactgagcagggtgagcatcatggctggatccctcacagggctgcttcttttgcaggcagtctcatgggcctctggagccaggccctgtattcccaagtcattcggctactcctcagtggtgtgtgtatgcaatgccacctattgtgacagtttcgatcctccaactctccctgctctgggtaccttctccatgtatgagagcacaagaagtggaagacgcatggagctctcaatgggccctatacaggctaaccacactgggacaggtctgctgctgaccctccaacctgaacagaagtttcagaaagtcaagggatttggaggagccatgactgatgcagcagcactcaacatcttggccctgtctccaccagcccagaatctgctgttgaagtcctacttctcagaggaggggattggctacaacatcatccgggttcccatggctagctgtgacttctccattaggacctatacatacgctgacacccccgatgattttcagctccataatttcagtctccctgaagaagacaccaaactgaagatacctctgattcacagagccttgcaactgtcccaaaggccagtgagcctcttcgcttctccctggactagtcctacatggctgaagactaatggtgctgttaatgggaaaggctccctgaaaggacagccaggtgacatatatcatcagacatgggcccgctactttgtgaaattccttgatgcctatgcagagcacaagctccaattctgggcagtcaccgcagaaaacgagccctcagctgggctgctgtctggctacccctttcagtgcttgggctttactcctgagcatcaacgggacttcattgcccgggatttggggccaacactggccaacagcacccaccacaatgtaagactcctcatgctggatgaccagaggctgctgctccctcattgggccaaggtggtgttgacagacccagaagctgccaaatatgttcatggcatcgctgtccactggtacctggattttttggcccctgcaaaggctactctgggagagacccacagactcttccccaataccatgctgtttgcatcagaagcctgcgtggggagcaaattctgggagcagtctgttaggctgggttcctgggatcggggcatgcaatattcccatagtataataactaacctcctctaccacgtggtaggatggacagactggaatctggctttgaacccagaaggaggccccaattgggtgcgcaactttgttgacagccccatcattgtggatatcacaaaggacaccttctacaaacagcctatgttctatcatctggggcactttagcaagttcattccagagggttcccagagagtaggcttggttgcctcacagaagaatgatctggatgctgtggcactcctgcatcctgacgggagtgcagtggtggtagtactgaacaggtctagcaaagatgttcccttgactatcaaagacccagctgtgggctttctggaaaccatttcccctggatactctatccacacctatctctggagaagacagtaatga

SEQ ID NO: 434 - protein, 536 aa, synthetic construct
  REGION 1..536: note = Variant of B-Glucocerebrosidase
MEFSSPSREECPKPLSRVSIMAGSLTGLLLLQAVSWASGARPCIPKSFGYSSVVCVCNATYCDSFDPPTLPALGTFSMYESTRSGRRMELSMGPIQANHTGTGLLLTLQPEQKFQKVKGFGGAMTDAAALNILALSPPAQNLLLKSYFSEEGIGYNIIRVPMASCDFSIRTYTYADTPDDFQLHNFSLPEEDTKLKIPLIHRALQLSQRPVSLFASPWTSPTWLKTNGAVNGKGSLKGQPGDIYHQTWARYFVKFLDAYAEHKLQFWAVTAENEPSAGLLSGYPFQCLGFTPEHQRDFIARDLGPTLANSTHHNVRLLMLDDQRLLLPHWAKVVLTDPEAAKYVHGIAVHWYLDFLAPAKATLGETHRLFPNTMLFASEACVGSKFWEQSVRLGSWDRGMQYSHSIITNLLYHVVGWTDWNLALNPEGGPNWVRNFVDSPIIVDITKDTFYKQPMFYHLGHFSKFIPEGSQRVGLVASQKNDLDAVALLHPDGSAVVVVLNRSSKDVPLTIKDPAVGFLETISPGYSIHTYLWRRQ

SEQ ID NO: 435 - DNA, 1614 bp, synthetic construct
  misc_feature 1..1614: note = Variant of B-Glucocerebrosidase
  source 1..1614: mol_type = other DNA
atggagttttcttctcctagtagagaagaatgccccaagccactgagcagggtgagcatcatggctggatccctcacagggctgcttcttttgcaggcagtctcatgggcctctggagccaggccctgtattcccaagtcattcggctactcctcagtggtgtgtgtatgcaatgccacctattgtgacagtttcgatcctccaactctccctgctctgggtaccttctcccggtatgagagcacaagaagtggaagacgcatggagctctcaatgggccctatacaggctaaccacactgggacaggtctgctgctgaccctccaacctgaacagaagtttcagaaagtcaagggatttggaggagccatgactgatgcagcagcactcaacatcttggccctgtctccaccagcccagaatctgctgttgaagtcctacttctcagaggaggggattggctacaacatcatccgggttcccatggctagctgtgacttctccattaggacctatacatacgctgacacccccgatgattttcagctccataatttcagtctccctgaagaagacaccaaactgaagatacctctgattcacagagccttgcaactgtcccaaaggccagtgagcctcttcgcttctccctggactagtcctacatggctgaagactaatggtgctgttaatgggaaaggctccctgaaaggacagccaggtgacatatatcatcagacatgggcccgctactttgtgaaattccttgatgcctatgcagagcacaagctccaattctgggcagtcaccgcagaaaacgagccctcagctgggctgctgtctggctacccctttcagtgcttgggctttactcctgagcatcaacgggacttcattgcccgggatttggggccaacactggccaacagcacccaccacaatgtaagactcctcatgctggatgaccagaggctgctgctccctcattgggccaaggtggtgttgacagacccagaagctgccaaatatgttcatggcatcgctgtccactggtacctggattttttggcccctgcaaaggctactctgggagagacccacagactcttccccaataccatgctgtttgcatcagaagcctgcgtggggagcaaattctgggagcagtctgttaggctgggttcctgggatcggggcatgcaatattcccatagtataataactaacctcctctaccacgtggtaggatggacagactggaatctggctttgaacccagaaggaggccccaattgggtgcgcaactttgttgacagccccatcattgtggatatcacaaaggacaccttctacaaacagcctatgttctatcatctggggcactttagcaagttcattccagagggttcccagagagtaggcttggttgcctcacagaagaatgatctggatgctgtggcactcctgcatcctgacgggagtgcagtggtggtagtactgaacaggtctagcaaagatctgcccttgactatcaaagacccagctgtgggctttctggaaaccatttcccctggatactctatccacacctatctctggagaagacagtaatga

SEQ ID NO: 436 - protein, 536 aa, synthetic construct
  REGION 1..536: note = Variant of B-Glucocerebrosidase
MEFSSPSREECPKPLSRVSIMAGSLTGLLLLQAVSWASGARPCIPKSFGYSSVVCVCNATYCDSFDPPTLPALGTFSRYESTRSGRRMELSMGPIQANHTGTGLLLTLQPEQKFQKVKGFGGAMTDAAALNILALSPPAQNLLLKSYFSEEGIGYNIIRVPMASCDFSIRTYTYADTPDDFQLHNFSLPEEDTKLKIPLIHRALQLSQRPVSLFASPWTSPTWLKTNGAVNGKGSLKGQPGDIYHQTWARYFVKFLDAYAEHKLQFWAVTAENEPSAGLLSGYPFQCLGFTPEHQRDFIARDLGPTLANSTHHNVRLLMLDDQRLLLPHWAKVVLTDPEAAKYVHGIAVHWYLDFLAPAKATLGETHRLFPNTMLFASEACVGSKFWEQSVRLGSWDRGMQYSHSIITNLLYHVVGWTDWNLALNPEGGPNWVRNFVDSPIIVDITKDTFYKQPMFYHLGHFSKFIPEGSQRVGLVASQKNDLDAVALLHPDGSAVVVVLNRSSKDLPLTIKDPAVGFLETISPGYSIHTYLWRRQ

SEQ ID NO: 437 - DNA, 1614 bp, synthetic construct
  misc_feature 1..1614: note = Variant of B-Glucocerebrosidase
  source 1..1614: mol_type = other DNA
atggagttttcttctcctagtagagaagaatgccccaagccactgagcagggtgagcatcatggctggatccctcacagggctgcttcttttgcaggcagtctcatgggcctctggagccaggccctgtattcccaagtcattcggctactcctcagtggtgtgtgtatgcaatgccacctattgtgacagtttcgatcctccaactctccctgctctgggtaccttctcccggtatgagagcacaagaagtggaagacgcatggagctctcaatgggccctatacaggctaaccacactgggacaggtctgctgctgaccctccaacctgaacagaagtttcagaaagtcaagggatttggaggagccatgactgatgcagcagcactcaacatcttggccctgtctccaccagcccagaatctgctgttgaagtcctacttctcagaggaggggattggctacaacatcatccgggttcccatggctagctgtgacttctccattaggacctatacatacgctgacacccccgatgattttcagctccataatttcagtctccctgaagaagacaccaaactgaagatacctctgattcacagagccttgcaactgtcccaaaggccagtgagcctcttcgcttctccctggactagtcctacatggctgaagactaatggtgctgttaatgggaaaggctccctgaaaggacagccaggtgacatatatcatcagacatgggcccgctactttgtgaaattccttgatgcctatgcagagcacaagctccaattctgggcagtcaccgcagaaaacgagccctcagctgggctgctgtctggctacccctttcagtgcttgggctttactcctgagcatcaacgggacttcattgcccgggatttggggccaacactggccaacagcacccaccacaatgtaagactcctcatgctggatgaccagaggctgctgctccctcattgggccaaggtggtgttgacagacccagaagctgccaaatatgttcatggcatcgctgtccactggtacctggattttttggcccctgcaaaggctactctgggagagacccacagactcttccccaataccatgctgtttgcatcagaagcctgcgtggggagcaaattctgggagcagtctgttaggctgggttcctgggatcggggcatgcaatattcccatagtataataactaacctcctctaccacgtggtaggatggacagactggaatctggctttgaacccagaaggaggccccaattgggtgcgcaactttgttgacagccccatcattgtggatatcacaaaggacatgttctacaaacagcctatgttctatcatctggggcactttagcaagttcattccagagggttcccagagagtaggcttggttgcctcacagaagaatgatctggatgctgtggcactcctgcatcctgacgggagtgcagtggtggtagtactgaacaggtctagcaaagatgttcccttgactatcaaagacccagctgtgggctttctggaaaccatttcccctggatactctatccacacctatctctggagaagacagtaatga

SEQ ID NO: 438 - protein, 536 aa, synthetic construct
  REGION 1..536: note = Variant of B-Glucocerebrosidase
MEFSSPSREECPKPLSRVSIMAGSLTGLLLLQAVSWASGARPCIPKSFGYSSVVCVCNATYCDSFDPPTLPALGTFSRYESTRSGRRMELSMGPIQANHTGTGLLLTLQPEQKFQKVKGFGGAMTDAAALNILALSPPAQNLLLKSYFSEEGIGYNIIRVPMASCDFSIRTYTYADTPDDFQLHNFSLPEEDTKLKIPLIHRALQLSQRPVSLFASPWTSPTWLKTNGAVNGKGSLKGQPGDIYHQTWARYFVKFLDAYAEHKLQFWAVTAENEPSAGLLSGYPFQCLGFTPEHQRDFIARDLGPTLANSTHHNVRLLMLDDQRLLLPHWAKVVLTDPEAAKYVHGIAVHWYLDFLAPAKATLGETHRLFPNTMLFASEACVGSKFWEQSVRLGSWDRGMQYSHSIITNLLYHVVGWTDWNLALNPEGGPNWVRNFVDSPIIVDITKDMFYKQPMFYHLGHFSKFIPEGSQRVGLVASQKNDLDAVALLHPDGSAVVVVLNRSSKDVPLTIKDPAVGFLETISPGYSIHTYLWRRQ

SEQ ID NO: 439 - DNA, 1614 bp, synthetic construct
  misc_feature 1..1614: note = Variant of B-Glucocerebrosidase
  source 1..1614: mol_type = other DNA
atggagttttcttctcctagtagagaagaatgccccaagccactgagcagggtgagcatcatggctggatccctcacagggctgcttcttttgcaggcagtctcatgggcctctggagccaggccctgtattcccaagtcattcggctactcctcagtggtgtgtgtatgcaatgccacctattgtgacagtttcgatcctccaactctccctgctctgggtaccttctcccggtatgagagcacaagaagtggaagacgcatggagctctcaatgggccctatacaggctaaccacactgggacaggtctgctgctgaccctccaacctgaacagaagtttcagaaagtcaagggatttggaggagccatgactgatgcagcagcactcaacatcttggccctgtctccaccagcccagaatctgctgttgaagtcctacttctcagaggaggggattggctacaacatcatccgggttcccatggctagctgtgacttctccattaggacctatacatacgctgacacccccgatgattttcagctccataatttcagtctccctgaagaagacaccaaactgaagatacctctgattcacagagccttgcaactgtcccaaaggccagtgagcctcttcgcttctccctggactagtcctacatggctgaagactaatggtgctgttaatgggaaaggctccctgaaaggacagccaggtgacatatatcatcagacatgggcccgctactttgtgaaattccttgatgcctatgcagagcacaagctccaattctgggcagtcaccgcagaaaacgagccctcagctgggctgctgtctggctacccctttcagtgcttgggctttactcctgagcatcaacgggacttcattgcccgggatttggggccaacactggccaacagcacccaccacaatgtaagactcctcatgctggatgaccagaggctgctgctccctcattgggccaaggtggtgttgacagacccagaagctgccaaatatgttcatggcatcgctgtccactggtacctggattttttggcccctgcaaaggctactctgggagagacccacagactcttccccaataccatgctgtttgcatcagaagcctgcgtggggagcaaattctgggagcagtctgttaggctgggttcctgggatcggggcatgcaatattcccatagtataataactaacctcctctaccacgtggtaggatggacagactggaatctggctttgaacccagaaggaggccccaattgggtgcgcaactttgttgacagccccatcattgtggatatcacaaaggacaccttctacaaacagcctatgttctatcatctggggcactttagcaagttcattccagagggttcccttagagtaggcttggttgcctcacagaagaatgatctggatgctgtggcactcctgcatcctgacgggagtgcagtggtggtagtactgaacaggtctagcaaagatgttcccttgactatcaaagacccagctgtgggctttctggaaaccatttcccctggatactctatccacacctatctctggagaagacagtaatga

SEQ ID NO: 440 - protein, 536 aa, synthetic construct
  REGION 1..536: note = Variant of B-Glucocerebrosidase
MEFSSPSREECPKPLSRVSIMAGSLTGLLLLQAVSWASGARPCIPKSFGYSSVVCVCNATYCDSFDPPTLPALGTFSRYESTRSGRRMELSMGPIQANHTGTGLLLTLQPEQKFQKVKGFGGAMTDAAALNILALSPPAQNLLLKSYFSEEGIGYNIIRVPMASCDFSIRTYTYADTPDDFQLHNFSLPEEDTKLKIPLIHRALQLSQRPVSLFASPWTSPTWLKTNGAVNGKGSLKGQPGDIYHQTWARYFVKFLDAYAEHKLQFWAVTAENEPSAGLLSGYPFQCLGFTPEHQRDFIARDLGPTLANSTHHNVRLLMLDDQRLLLPHWAKVVLTDPEAAKYVHGIAVHWYLDFLAPAKATLGETHRLFPNTMLFASEACVGSKFWEQSVRLGSWDRGMQYSHSIITNLLYHVVGWTDWNLALNPEGGPNWVRNFVDSPIIVDITKDTFYKQPMFYHLGHFSKFIPEGSLRVGLVASQKNDLDAVALLHPDGSAVVVVLNRSSKDVPLTIKDPAVGFLETISPGYSIHTYLWRRQ

SEQ ID NO: 441 - DNA, 1614 bp, synthetic construct
  misc_feature 1..1614: note = Variant of B-Glucocerebrosidase
  source 1..1614: mol_type = other DNA
atggagttttcttctcctagtagagaagaatgccccaagccactgagcagggtgagcatcatggctggatccctcacagggctgcttcttttgcaggcagtctcatgggcctctggagccaggccctgtattcccaagtcattcggctactcctcagtggtgtgtgtatgcaatgccacctattgtgacagtttcgatcctccaactctccctgctctgggtaccttctcccggtatgagagcacaagaagtggaagacgcatggagctctcaatgggccctatacaggctaaccacactgggacaggtctgctgctgaccctccaacctgaacagaagtttcagaaagtcaagggatttggaggagccatgactgatgcagcagcactcaacatcttggccctgtctccaccagcccagaatctgctgttgaagtcctacttctcagaggaggggattggctacaacatcatccgggttcccatggctagctgtgacttctccattaggacctatacatacgctgacacccccgatgattttcagctccataatttcagtctccctgaagaagacaccaaactgaagatacctctgattcacagagccttgcaactgtcccaaaggccattgagcctcttcgcttctccctggactagtcctacatggctgaagactaatggtgctgttaatgggaaaggctccctgaaaggacagccaggtgacatatatcatcagacatgggcccgctactttgtgaaattccttgatgcctatgcagagcacaagctccaattctgggcagtcaccgcagaaaacgagccctcagctgggctgctgtctggctacccctttcagtgcttgggctttactcctgagcatcaacgggacttcattgcccgggatttggggccaacactggccaacagcacccaccacaatgtaagactcctcatgctggatgaccagaggctgctgctccctcattgggccaaggtggtgttgacagacccagaagctgccaaatatgttcatggcatcgctgtccactggtacctggattttttggcccctgcaaaggctactctgggagagacccacagactcttccccaataccatgctgtttgcatcagaagcctgcgtggggagcaaattctgggagcagtctgttaggctgggttcctgggatcggggcatgcaatattcccatagtataataactaacctcctctaccacgtggtaggatggacagactggaatctggctttgaacccagaaggaggccccaattgggtgcgcaactttgttgacagccccatcattgtggatatcacaaaggacaccttctacaaacagcctatgttctatcatctggggcactttagcaagttcattccagagggttcccagagagtaggcttggttgcctcacagaagaatgatctggatgctgtggcactcctgcatcctgacgggagtgcagtggtggtagtactgaacaggtctagcaaagatgttcccttgactatcaaagacccagctgtgggctttctggaaaccatttcccctggatactctatccacacctatctctggagaagacagtaatga

SEQ ID NO: 442 - protein, 536 aa, synthetic construct
  REGION 1..536: note = Variant of B-Glucocerebrosidase
MEFSSPSREECPKPLSRVSIMAGSLTGLLLLQAVSWASGARPCIPKSFGYSSVVCVCNATYCDSFDPPTLPALGTFSRYESTRSGRRMELSMGPIQANHTGTGLLLTLQPEQKFQKVKGFGGAMTDAAALNILALSPPAQNLLLKSYFSEEGIGYNIIRVPMASCDFSIRTYTYADTPDDFQLHNFSLPEEDTKLKIPLIHRALQLSQRPLSLFASPWTSPTWLKTNGAVNGKGSLKGQPGDIYHQTWARYFVKFLDAYAEHKLQFWAVTAENEPSAGLLSGYPFQCLGFTPEHQRDFIARDLGPTLANSTHHNVRLLMLDDQRLLLPHWAKVVLTDPEAAKYVHGIAVHWYLDFLAPAKATLGETHRLFPNTMLFASEACVGSKFWEQSVRLGSWDRGMQYSHSIITNLLYHVVGWTDWNLALNPEGGPNWVRNFVDSPIIVDITKDTFYKQPMFYHLGHFSKFIPEGSQRVGLVASQKNDLDAVALLHPDGSAVVVVLNRSSKDVPLTIKDPAVGFLETISPGYSIHTYLWRRQ

SEQ ID NO: 443 - DNA, 1614 bp, synthetic construct
  misc_feature 1..1614: note = Variant of B-Glucocerebrosidase
  source 1..1614: mol_type = other DNA
atggagttttcttctcctagtagagaagaatgccccaagccactgagcagggtgagcatcatggctggatccctcacagggctgcttcttttgcaggcagtctcatgggcctctggagccaggccctgtattcccaagtcattcggctactcctcagtggtgtgtgtatgcaatgccacctattgtgacagtttcgatcctccaactctccctgctctgggtaccttctcccggtatgagagcacaagaagtggaagacgcatggagctctcaatgggccctatacaggctaaccacactgggacaggtctgctgctgaccctccaacctgaacagaagtttcagaaagtcaagggatttggaggagccatgactgatgcagcagcactcaacatcttggccctgtctccaccagcccagaatctgctgttgaagtcctacttctcagaggaggggattggctacaacatcatccgggttcccatggctagctgtgacttctccattaggacctatacatacgctgacacccccgatgattttcagctccataatttcagtctccctgaagaagacaccaaactgaagatacctctgattcacagagccttgcaactgtcccaaaggccagtgagcctcttcgcttctccctggactagtcctacatggctgaagactaatggtgctgttaatgggaaaggctccctgaaaggacagccaggtgacatatatcatcagacatgggcccgctactttgtgaaattccttgatgcctatgcagagcacaagctccaattctgggcagtcaccgcagaaaacgagccctcagctgggctgctgtctggctacccctttcagtgcttgggctttactcctgagcatcaacgggacttcattgcccgggatttggggccaacactggccaacagcacccaccacaatgtaagactcctcatgctggatgaccagaggctgctgctccctcattgggccaaggtggtgttgacagacccagaagctgccaaatatgttcatggcatcgctgtccactggtacctggattttttggcccctgcaaaggctactctgggagagacccacagactcttccccaataccatgctgtttgcatcagaagcctgcgtggggagcaaattctgggagcagtctgttaggctgggttcctgggatcggggcatgcaatattcccatagtataataactaacctcctctaccacgtggtaggatggacagactggaatctggctttgaacccagaaggaggccccaattgggtgcgcaactttgttgacagccccatcattgtggatatcacaaaggacaccttctacaaacagcctatgttctatcatctggggcactttagcaagttcattccagagggttcccagagagtaggcttggttgcctcacagaagaatgatctggatgctgtggcactcctgcatcctgacgggagtgcagtggtggtagtactgaacaggtctagcaaagatgttcccttgactatcaaagacccagctgtgggctttctggataccatttcccctggatactctatccacacctatctctggagaagacagtaatga

SEQ ID NO: 444 - protein, 536 aa, synthetic construct
  REGION 1..536: note = Variant of B-Glucocerebrosidase
MEFSSPSREECPKPLSRVSIMAGSLTGLLLLQAVSWASGARPCIPKSFGYSSVVCVCNATYCDSFDPPTLPALGTFSRYESTRSGRRMELSMGPIQANHTGTGLLLTLQPEQKFQKVKGFGGAMTDAAALNILALSPPAQNLLLKSYFSEEGIGYNIIRVPMASCDFSIRTYTYADTPDDFQLHNFSLPEEDTKLKIPLIHRALQLSQRPVSLFASPWTSPTWLKTNGAVNGKGSLKGQPGDIYHQTWARYFVKFLDAYAEHKLQFWAVTAENEPSAGLLSGYPFQCLGFTPEHQRDFIARDLGPTLANSTHHNVRLLMLDDQRLLLPHWAKVVLTDPEAAKYVHGIAVHWYLDFLAPAKATLGETHRLFPNTMLFASEACVGSKFWEQSVRLGSWDRGMQYSHSIITNLLYHVVGWTDWNLALNPEGGPNWVRNFVDSPIIVDITKDTFYKQPMFYHLGHFSKFIPEGSQRVGLVASQKNDLDAVALLHPDGSAVVVVLNRSSKDVPLTIKDPAVGFLDTISPGYSIHTYLWRRQ

SEQ ID NO: 445 - DNA, 1614 bp, synthetic construct
  misc_feature 1..1614: note = Variant of B-Glucocerebrosidase
  source 1..1614: mol_type = other DNA
atggagttttcttctcctagtagagaagaatgccccaagccactgagcagggtgagcatcatggctggatccctcacagggctgcttcttttgcaggcagtctcatgggcctctggagccaggccctgtattcccaagtcattcggctactcctcagtggtgtgtgtatgcaatgccacctattgtgacagtttcgatcctccaactctccctgctctgggtaccttctcccggtatgagagcacaagaagtggaagacgcatggagctctcaatgggccctatacaggctaaccacactgggacaccgctgctgctgaccctccaacctgaacagaagtttcagaaagtcaagggatttggaggagccatgactgatgcagcagcactcaacatcttggccctgtctccaccagcccagaatctgctgttgaagtcctacttctcagaggaggggattggctacaacatcatccgggttcccatggctagctgtgacttctccattaggacctatacatacgctgacacccccgatgattttcagctccataatttcagtctccctgaagaagacaccaaactgaagatacctctgattcacagagccttgcaactgtcccaaaggccagtgagcctcttcgcttctccctggactagtcctacatggctgaagactaatggtgctgttaatgggaaaggctccctgaaaggacagccaggtgacatatatcatcagacatgggcccgctactttgtgaaattccttgatgcctatgcagagcacaagctccaattctgggcagtcaccgcagaaaacgagccctcagctgggctgctgtctggctacccctttcagtgcttgggctttactcctgagcatcaacgggacttcattgcccgggatttggggccaacactggccaacagcacccaccacaatgtaagactcctcatgctggatgaccagaggctgctgctccctcattgggccaaggtggtgttgacagacccagaagctgccaaatatgttcatggcatcgctgtccactggtacctggattttttggcccctgcaaaggctactctgggagagacccacagactcttccccaataccatgctgtttgcatcagaagcctgcgtggggagcaaattctgggagcagtctgttaggctgggttcctgggatcggggcatgcaatattcccatagtataataactaacctcctctaccacgtggtaggatggacagactggaatctggctttgaacccagaaggaggccccaattgggtgcgcaactttgttgacagccccatcattgtggatatcacaaaggacaccttctacaaacagcctatgttctatcatctggggcactttagcaagttcattccagagggttcccagagagtaggcttggttgcctcacagaagaatgatctggatgctgtggcactcctgcatcctgacgggagtgcagtggtggtagtactgaacaggtctagcaaagatgttcccttgactatcaaagacccagctgtgggctttctggaaaccatttcccctggatactctatccacacctatctctggagaagacagtaatga

SEQ ID NO: 446 - protein, 536 aa, synthetic construct
  REGION 1..536: note = Variant of B-Glucocerebrosidase
MEFSSPSREECPKPLSRVSIMAGSLTGLLLLQAVSWASGARPCIPKSFGYSSVVCVCNATYCDSFDPPTLPALGTFSRYESTRSGRRMELSMGPIQANHTGTPLLLTLQPEQKFQKVKGFGGAMTDAAALNILALSPPAQNLLLKSYFSEEGIGYNIIRVPMASCDFSIRTYTYADTPDDFQLHNFSLPEEDTKLKIPLIHRALQLSQRPVSLFASPWTSPTWLKTNGAVNGKGSLKGQPGDIYHQTWARYFVKFLDAYAEHKLQFWAVTAENEPSAGLLSGYPFQCLGFTPEHQRDFIARDLGPTLANSTHHNVRLLMLDDQRLLLPHWAKVVLTDPEAAKYVHGIAVHWYLDFLAPAKATLGETHRLFPNTMLFASEACVGSKFWEQSVRLGSWDRGMQYSHSIITNLLYHVVGWTDWNLALNPEGGPNWVRNFVDSPIIVDITKDTFYKQPMFYHLGHFSKFIPEGSQRVGLVASQKNDLDAVALLHPDGSAVVVVLNRSSKDVPLTIKDPAVGFLETISPGYSIHTYLWRRQ

SEQ ID NO: 447 - DNA, 1614 bp, synthetic construct
  misc_feature 1..1614: note = Variant of B-Glucocerebrosidase
  source 1..1614: mol_type = other DNA
atggagttttcttctcctagtagagaagaatgccccaagccactgagcagggtgagcatcatggctggatccctcacagggctgcttcttttgcaggcagtctcatgggcctctggagccaggccctgtattcccaagtcattcggctactcctcagtggtgtgtgtatgcaatgccacctattgtgacagtttcgatcctccaactctccctgctctgggtaccttctcccggtatgagagcacaagaagtggaagacgcatggagctctcaatgggccctatacaggctaaccacactgggacaggtctgctgctgaccctccaacctgaacagaagtttcagaaagtcaagggatttggaggagccatgactgatgcagcagcactcaacatcttggccctgtctccaccagcccagaatctgctgttgaagtcctacttctcagaggaggggattggctacaacatcatccgggttcccatggctagctgtgacttctccattaggacctatacatacgctgacacccccgatgattttcagctccataatttcagtctccctgaagaagacaccaaactgaagatacctctgattcacagagccttgcaattttcccaaaggccagtgagcctcttcgcttctccctggactagtcctacatggctgaagactaatggtgctgttaatgggaaaggctccctgaaaggacagccaggtgacatatatcatcagacatgggcccgctactttgtgaaattccttgatgcctatgcagagcacaagctccaattctgggcagtcaccgcagaaaacgagccctcagctgggctgctgtctggctacccctttcagtgcttgggctttactcctgagcatcaacgggacttcattgcccgggatttggggccaacactggccaacagcacccaccacaatgtaagactcctcatgctggatgaccagaggctgctgctccctcattgggccaaggtggtgttgacagacccagaagctgccaaatatgttcatggcatcgctgtccactggtacctggattttttggcccctgcaaaggctactctgggagagacccacagactcttccccaataccatgctgtttgcatcagaagcctgcgtggggagcaaattctgggagcagtctgttaggctgggttcctgggatcggggcatgcaatattcccatagtataataactaacctcctctaccacgtggtaggatggacagactggaatctggctttgaacccagaaggaggccccaattgggtgcgcaactttgttgacagccccatcattgtggatatcacaaaggacaccttctacaaacagcctatgttctatcatctggggcactttagcaagttcattccagagggttcccagagagtaggcttggttgcctcacagaagaatgatctggatgctgtggcactcctgcatcctgacgggagtgcagtggtggtagtactgaacaggtctagcaaagatgttcccttgactatcaaagacccagctgtgggctttctggaaaccatttcccctggatactctatccacacctatctctggagaagacagtaatga

SEQ ID NO: 448 - protein, 536 aa, synthetic construct
  REGION 1..536: note = Variant of B-Glucocerebrosidase
MEFSSPSREECPKPLSRVSIMAGSLTGLLLLQAVSWASGARPCIPKSFGYSSVVCVCNATYCDSFDPPTLPALGTFSRYESTRSGRRMELSMGPIQANHTGTGLLLTLQPEQKFQKVKGFGGAMTDAAALNILALSPPAQNLLLKSYFSEEGIGYNIIRVPMASCDFSIRTYTYADTPDDFQLHNFSLPEEDTKLKIPLIHRALQFSQRPVSLFASPWTSPTWLKTNGAVNGKGSLKGQPGDIYHQTWARYFVKFLDAYAEHKLQFWAVTAENEPSAGLLSGYPFQCLGFTPEHQRDFIARDLGPTLANSTHHNVRLLMLDDQRLLLPHWAKVVLTDPEAAKYVHGIAVHWYLDFLAPAKATLGETHRLFPNTMLFASEACVGSKFWEQSVRLGSWDRGMQYSHSIITNLLYHVVGWTDWNLALNPEGGPNWVRNFVDSPIIVDITKDTFYKQPMFYHLGHFSKFIPEGSQRVGLVASQKNDLDAVALLHPDGSAVVVVLNRSSKDVPLTIKDPAVGFLETISPGYSIHTYLWRRQ

SEQ ID NO: 449 - DNA, 1614 bp, synthetic construct
  misc_feature 1..1614: note = Variant of B-Glucocerebrosidase
  source 1..1614: mol_type = other DNA
atggagttttcttctcctagtagagaagaatgccccaagccactgagcagggtgagcatcatggctggatccctcacagggctgcttcttttgcaggcagtctcatgggcctctggagccaggccctgtattcccaagtcattcggctactcctcagtggtgtgtgtatgcaatgccacctattgtgacagtttcgatcctccaactctccctgctctgggtaccttctcccggtatgagagcacaagaagtggaagacgcatggagctctcaatgtctcctatacaggctaaccacactgggacaggtctgctgctgaccctccaacctgaacagaagtttcagaaagtcaagggatttggaggagccatgactgatgcagcagcactcaacatcttggccctgtctccaccagcccagaatctgctgttgaagtcctacttctcagaggaggggattggctacaacatcatccgggttcccatggctagctgtgacttctccattaggacctatacatacgctgacacccccgatgattttcagctccataatttcagtctccctgaagaagacaccaaactgaagatacctctgattcacagagccttgcaactgtcccaaaggccagtgagcctcttcgcttctccctggactagtcctacatggctgaagactaatggtgctgttaatgggaaaggctccctgaaaggacagccaggtgacatatatcatcagacatgggcccgctactttgtgaaattccttgatgcctatgcagagcacaagctccaattctgggcagtcaccgcagaaaacgagccctcagctgggctgctgtctggctacccctttcagtgcttgggctttactcctgagcatcaacgggacttcattgcccgggatttggggccaacactggccaacagcacccaccacaatgtaagactcctcatgctggatgaccagaggctgctgctccctcattgggccaaggtggtgttgacagacccagaagctgccaaatatgttcatggcatcgctgtccactggtacctggattttttggcccctgcaaaggctactctgggagagacccacagactcttccccaataccatgctgtttgcatcagaagcctgcgtggggagcaaattctgggagcagtctgttaggctgggttcctgggatcggggcatgcaatattcccatagtataataactaacctcctctaccacgtggtaggatggacagactggaatctggctttgaacccagaaggaggccccaattgggtgcgcaactttgttgacagccccatcattgtggatatcacaaaggacaccttctacaaacagcctatgttctatcatctggggcactttagcaagttcattccagagggttcccagagagtaggcttggttgcctcacagaagaatgatctggatgctgtggcactcctgcatcctgacgggagtgcagtggtggtagtactgaacaggtctagcaaagatgttcccttgactatcaaagacccagctgtgggctttctggaaaccatttcccctggatactctatccacacctatctctggagaagacagtaatga

SEQ ID NO: 450 - protein, 536 aa, synthetic construct
  REGION 1..536: note = Variant of B-Glucocerebrosidase
MEFSSPSREECPKPLSRVSIMAGSLTGLLLLQAVSWASGARPCIPKSFGYSSVVCVCNATYCDSFDPPTLPALGTFSRYESTRSGRRMELSMSPIQANHTGTGLLLTLQPEQKFQKVKGFGGAMTDAAALNILALSPPAQNLLLKSYFSEEGIGYNIIRVPMASCDFSIRTYTYADTPDDFQLHNFSLPEEDTKLKIPLIHRALQLSQRPVSLFASPWTSPTWLKTNGAVNGKGSLKGQPGDIYHQTWARYFVKFLDAYAEHKLQFWAVTAENEPSAGLLSGYPFQCLGFTPEHQRDFIARDLGPTLANSTHHNVRLLMLDDQRLLLPHWAKVVLTDPEAAKYVHGIAVHWYLDFLAPAKATLGETHRLFPNTMLFASEACVGSKFWEQSVRLGSWDRGMQYSHSIITNLLYHVVGWTDWNLALNPEGGPNWVRNFVDSPIIVDITKDTFYKQPMFYHLGHFSKFIPEGSQRVGLVASQKNDLDAVALLHPDGSAVVVVLNRSSKDVPLTIKDPAVGFLETISPGYSIHTYLWRRQ

SEQ ID NO: 451 - DNA, 1614 bp, synthetic construct
  misc_feature 1..1614: note = Variant of B-Glucocerebrosidase
  source 1..1614: mol_type = other DNA
atggagttttcttctcctagtagagaagaatgccccaagccactgagcagggtgagcatcatggctggatccctcacagggctgcttcttttgcaggcagtctcatgggcctctggagccaggccctgtattcccaagtcattcggctactcctcagtggtgtgtgtatgcaatgccacctattgtgacagtttcgatcctccaactctccctgctctgggtaccttctcccggtatgagagcacaagaagtggaagacgcatggagctctcaatgggccctatacaggctaaccacactgggacaggtctgctgctgaccctccaacctgaacagaagtttcagaaagtcaagggatttggaggagccatgactgatgcagcagcactcaacatcttggccctgtctccaccagcccagaatctgctgttgaagtcctacttctcagaggaggggattggctacaacatcatccgggttcccatggctagctgtgacttctccattaggacctatacatacgctgacacccccgatgattttcagctccataatttcagtctccctgaagaagacaccaaactgaagatacctctgattcacagagccttgcaactgtcccaaaggccagtgagcctcttcgcttctccctggactagtcctacatggctgaagactaatggtgctgttaatgggaaaggctccctgaaaggacagccaggtgacatatatcatcagacatgggcccgctactttgtgaaattccttgatgcctatgcagagcacaagctccaattctgggcagtcaccgcagaaaacgagccctcagctgggctgctgtctggctacccctttcagtgcttgggctttactcctgagcatcaacgggacttcattgcccgggatttggggccaacactggccaacagcacccaccacaatgtaagactcctcatgctggatgaccagaggctgctgctccctcattgggccaaggtggtgttgacagacccagaagctgccaaatatgttcatggcatcgctgtccactggtacctggattttttggcccctgcaaaggctactctgggagagacccacagactcttccccaataccatgctgtttgcatcagaagcctgcgtggggagcaaattctgggagcagtctgttaggctgggttcctgggatcggggcatgcaatattcccatagtataataactaacctcctctaccacgtggtaggatggacagactggaatctggctttgaacccagaaggaggccccaattgggtgcgcaactttgttgacagccccatcattgtggatatcacaaaggacaccttctacaaacagcctatgttctatcatctggggcactttagcaagttcattccagagggttcccagagagtaggcttggttgcctcacagaagaatgatctggatgctgtggcactcctgagtcctgacgggagtgcagtggtggtagtactgaacaggtctagcaaagatgttcccttgactatcaaagacccagctgtgggctttctggaaaccatttcccctggatactctatccacacctatctctggagaagacagtaatga

SEQ ID NO: 452 - protein, 536 aa, synthetic construct
  REGION 1..536: note = Variant of B-Glucocerebrosidase
MEFSSPSREECPKPLSRVSIMAGSLTGLLLLQAVSWASGARPCIPKSFGYSSVVCVCNATYCDSFDPPTLPALGTFSRYESTRSGRRMELSMGPIQANHTGTGLLLTLQPEQKFQKVKGFGGAMTDAAALNILALSPPAQNLLLKSYFSEEGIGYNIIRVPMASCDFSIRTYTYADTPDDFQLHNFSLPEEDTKLKIPLIHRALQLSQRPVSLFASPWTSPTWLKTNGAVNGKGSLKGQPGDIYHQTWARYFVKFLDAYAEHKLQFWAVTAENEPSAGLLSGYPFQCLGFTPEHQRDFIARDLGPTLANSTHHNVRLLMLDDQRLLLPHWAKVVLTDPEAAKYVHGIAVHWYLDFLAPAKATLGETHRLFPNTMLFASEACVGSKFWEQSVRLGSWDRGMQYSHSIITNLLYHVVGWTDWNLALNPEGGPNWVRNFVDSPIIVDITKDTFYKQPMFYHLGHFSKFIPEGSQRVGLVASQKNDLDAVALLSPDGSAVVVVLNRSSKDVPLTIKDPAVGFLETISPGYSIHTYLWRRQ

SEQ ID NO: 453 - DNA, 1614 bp, synthetic construct
  misc_feature 1..1614: note = Variant of B-Glucocerebrosidase
  source 1..1614: mol_type = other DNA
atggagttttcttctcctagtagagaagaatgccccaagccactgagcagggtgagcatcatggctggatccctcacagggctgcttcttttgcaggcagtctcatgggcctctggagccaggccctgtattcccaagtcattcggctactcctcagtggtgtgtgtatgcaatgccacctattgtgacagtttcgatcctccaactctccctgctctgggtaccttctcccggtatgagagcacaagaagtggaagacgcatggagctctcaatgggccctatacaggctaaccacactgggacaggtctgctgctgaccctccaacctgaacagaagtttcagaaagtcaagggatttggaggagccatgactgatgcagcagcactcaacatcttggccctgtctccaccagcccagaatctgctgttgaagtcctacttctcagaggaggggattggctacaacatcatccgggttcccatggctagctgtgacttctccattaggacctatacatacgctgacacccccgatgattttcagctccataatttcagtctccctgaagaagacaccaaactgaagatacctctgattcacagagccttgcaactgtcccaaaggccagtgagcctcttcgcttctccctggactagtcctacatggctgaagactaatggtgctgttaatgggaaaggctccctgaaaggacagccaggtgacatatatcatcagacatgggcccgctactttgtgaaattccttgatgcctatgcagagcacaagctccaattctgggcagtcaccgcagaaaacgagccctcagctgggctgctgtctggctacccctttcagtgcttgggctttactcctgagcatcaacgggacttcattgcccgggatttggggccaacactggccaacagcacccaccacaatgtaagactcctcatgctggatgaccagaggctgctgctccctcattgggccaaggtggtgttgacagacccagaagctgccaaatatgttcatggcatcgctgtccactggtacctggattttttggcccctgcaaaggctactctgggagagacccacagactcttccccaataccatgctgtttgcatcagaagcctgcgtggggagcaaattctgggagcagtctgttaggctgggttcctgggatcggggcatgcaatattcccatagtataataactaacctcctctaccacgtggtaggatggacagactggaatctggctttgaacccagaaggaggccccaattgggtgcgcaactttgttgacagccccatcattgtggatatcacaaaggacaccttctacaaacagcctatgttctatcatctggggcactttagcaagttcattccagagggttcccagagatgtggcttggttgcctcacagaagaatgatctggatgctgtggcactcctgcatcctgacgggagtgcagtggtggtagtactgaacaggtctagcaaagatgttcccttgactatcaaagacccagctgtgggctttctggaaaccatttcccctggatactctatccacacctatctctggagaagacagtaatga

SEQ ID NO: 454 - protein, 536 aa, synthetic construct
  REGION 1..536: note = Variant of B-Glucocerebrosidase
MEFSSPSREECPKPLSRVSIMAGSLTGLLLLQAVSWASGARPCIPKSFGYSSVVCVCNATYCDSFDPPTLPALGTFSRYESTRSGRRMELSMGPIQANHTGTGLLLTLQPEQKFQKVKGFGGAMTDAAALNILALSPPAQNLLLKSYFSEEGIGYNIIRVPMASCDFSIRTYTYADTPDDFQLHNFSLPEEDTKLKIPLIHRALQLSQRPVSLFASPWTSPTWLKTNGAVNGKGSLKGQPGDIYHQTWARYFVKFLDAYAEHKLQFWAVTAENEPSAGLLSGYPFQCLGFTPEHQRDFIARDLGPTLANSTHHNVRLLMLDDQRLLLPHWAKVVLTDPEAAKYVHGIAVHWYLDFLAPAKATLGETHRLFPNTMLFASEACVGSKFWEQSVRLGSWDRGMQYSHSIITNLLYHVVGWTDWNLALNPEGGPNWVRNFVDSPIIVDITKDTFYKQPMFYHLGHFSKFIPEGSQRCGLVASQKNDLDAVALLHPDGSAVVVVLNRSSKDVPLTIKDPAVGFLETISPGYSIHTYLWRRQ

SEQ ID NO: 455 - DNA, 1614 bp, synthetic construct
  misc_feature 1..1614: note = Variant of B-Glucocerebrosidase
  source 1..1614: mol_type = other DNA
atggagttttcttctcctagtagagaagaatgccccaagccactgagcagggtgagcatcatggctggatccctcacagggctgcttcttttgcaggcagtctcatgggcctctggagccaggccctgtattcccaagtcattcggctactcctcagtggtgtgtgtatgcaatgccacctattgtgacagtttcgatcctccaactctccctgctctgggtaccttctcccggtatgagagcacaagaagtggaagacgcatggagctctcaatgggccctatacaggctaaccacactgggacaggtctgctgctgaccctccaacctgaacagaagtttcagaaagtcaagggatttggaggagccatgactgatgcagcagcactcaacatcttggccctgtctccaccagcccagaatctgctgttgaagtcctacttctcagaggaggggattggctacaacatcatccgggttcccatggctagctgtgacttctccattaggacctatacatacgctgacacccccgatgattttcagctccataatttcagtctccctgaagaagacaccaaactgaagatacctctgattcacagagccttgcaactgtcccaaaggccagtgagcctcttcgcttctccctggactagtcctacatggctgaagactaatggtgctgttaatgggaaaggctccctgaaaggacagccaggtgacatatatcatcagacatgggcccgctactttgtgaaattccttgatgcctatgcagagcacaagctccaattctgggcagtcaccgcagaaaacgagccctcagctgggctgctgtctggctacccctttcagtgcttgggctttactcctgagcatcaacgggacttcattgcccgggatttggggccaacactggccaacagcacccaccacaatgtaagactcctcatgctggatgaccagaggctgctgctccctcattgggccaaggtggtgttgacagacccagaagctgccaaatatgttcatggcatcgctgtccactggtacctggattttttggcccctgcaaaggctactctgggagagacccacagactcttccccaataccatgctgtttgcatcagaagcctgcgtggggagcaaattctgggagcagtctgttaggctgggttcctgggatcggggcatgcaatattcccatagtataataactaacctcctctaccacgtggtaggatggacagactggaatctggctttgaacccagaaggaggccccaattgggtgcgcaactttgttgacagccccatcattgtggatatcacaaaggacaccttctacaaacagcctatgttctatcatctggggcactttagcaagttcattccagagggttcccagagagtaggcttggttgcctcacagaagaatgatctggatgctgtggcactcctgcatcctgacgggagtgcagtggtggtagtactgaacaggtctagcaaagatcggcccttgactatcaaagacccagctgtgggctttctggaaaccatttcccctggatactctatccacacctatctctggagaagacagtaatga

SEQ ID NO: 456 - protein, 536 aa, synthetic construct
  REGION 1..536: note = Variant of B-Glucocerebrosidase
MEFSSPSREECPKPLSRVSIMAGSLTGLLLLQAVSWASGARPCIPKSFGYSSVVCVCNATYCDSFDPPTLPALGTFSRYESTRSGRRMELSMGPIQANHTGTGLLLTLQPEQKFQKVKGFGGAMTDAAALNILALSPPAQNLLLKSYFSEEGIGYNIIRVPMASCDFSIRTYTYADTPDDFQLHNFSLPEEDTKLKIPLIHRALQLSQRPVSLFASPWTSPTWLKTNGAVNGKGSLKGQPGDIYHQTWARYFVKFLDAYAEHKLQFWAVTAENEPSAGLLSGYPFQCLGFTPEHQRDFIARDLGPTLANSTHHNVRLLMLDDQRLLLPHWAKVVLTDPEAAKYVHGIAVHWYLDFLAPAKATLGETHRLFPNTMLFASEACVGSKFWEQSVRLGSWDRGMQYSHSIITNLLYHVVGWTDWNLALNPEGGPNWVRNFVDSPIIVDITKDTFYKQPMFYHLGHFSKFIPEGSQRVGLVASQKNDLDAVALLHPDGSAVVVVLNRSSKDRPLTIKDPAVGFLETISPGYSIHTYLWRRQ

SEQ ID NO: 457 - DNA, 1614 bp, synthetic construct
  misc_feature 1..1614: note = Variant of B-Glucocerebrosidase
  source 1..1614: mol_type = other DNA
atggagttttcttctcctagtagagaagaatgccccaagccactgagcagggtgagcatcatggctggatccctcacagggctgcttcttttgcaggcagtctcatgggcctctggagccaggccctgtattcccaagtcattcggctactcctcagtggtgtgtgtatgcaatgccacctattgtgacagtttcgatcctccaactctccctgctctgggtaccttctcccggtatgagagcacaagaagtggaagacgcatggagctctcaatgggccctatacaggctaaccacactgggacaggtctgctgctgaccctccaacctgaacagaagtttcagaaagtcaagggatttggaggagccatgactgatgcagcagcactcaacatcttggccctgtctccaccagcccagaatctgctgttgaagtcctacttctcagaggaggggattggctacaacatcatccgggttcccatggctagctgtgacttctccattaggacctatacatacgctgacacccccgatgattttcagctccataatttcagtctccctgaagaagacaccaaactgaagatacctctgattcacagagccttgcaactgtcccaaaggccaattagcctcttcgcttctccctggactagtcctacatggctgaagactaatggtgctgttaatgggaaaggctccctgaaaggacagccaggtgacatatatcatcagacatgggcccgctactttgtgaaattccttgatgcctatgcagagcacaagctccaattctgggcagtcaccgcagaaaacgagccctcagctgggctgctgtctggctacccctttcagtgcttgggctttactcctgagcatcaacgggacttcattgcccgggatttggggccaacactggccaacagcacccaccacaatgtaagactcctcatgctggatgaccagaggctgctgctccctcattgggccaaggtggtgttgacagacccagaagctgccaaatatgttcatggcatcgctgtccactggtacctggattttttggcccctgcaaaggctactctgggagagacccacagactcttccccaataccatgctgtttgcatcagaagcctgcgtggggagcaaattctgggagcagtctgttaggctgggttcctgggatcggggcatgcaatattcccatagtataataactaacctcctctaccacgtggtaggatggacagactggaatctggctttgaacccagaaggaggccccaattgggtgcgcaactttgttgacagccccatcattgtggatatcacaaaggacaccttctacaaacagcctatgttctatcatctggggcactttagcaagttcattccagagggttcccagagagtaggcttggttgcctcacagaagaatgatctggatgctgtggcactcctgcatcctgacgggagtgcagtggtggtagtactgaacaggtctagcaaagatgttcccttgactatcaaagacccagctgtgggctttctggaaaccatttcccctggatactctatccacacctatctctggagaagacagtaatga

SEQ ID NO: 458 - protein, 536 aa, synthetic construct
  REGION 1..536: note = Variant of B-Glucocerebrosidase
MEFSSPSREECPKPLSRVSIMAGSLTGLLLLQAVSWASGARPCIPKSFGYSSVVCVCNATYCDSFDPPTLPALGTFSRYESTRSGRRMELSMGPIQANHTGTGLLLTLQPEQKFQKVKGFGGAMTDAAALNILALSPPAQNLLLKSYFSEEGIGYNIIRVPMASCDFSIRTYTYADTPDDFQLHNFSLPEEDTKLKIPLIHRALQLSQRPISLFASPWTSPTWLKTNGAVNGKGSLKGQPGDIYHQTWARYFVKFLDAYAEHKLQFWAVTAENEPSAGLLSGYPFQCLGFTPEHQRDFIARDLGPTLANSTHHNVRLLMLDDQRLLLPHWAKVVLTDPEAAKYVHGIAVHWYLDFLAPAKATLGETHRLFPNTMLFASEACVGSKFWEQSVRLGSWDRGMQYSHSIITNLLYHVVGWTDWNLALNPEGGPNWVRNFVDSPIIVDITKDTFYKQPMFYHLGHFSKFIPEGSQRVGLVASQKNDLDAVALLHPDGSAVVVVLNRSSKDVPLTIKDPAVGFLETISPGYSIHTYLWRRQ

SEQ ID NO: 459 - DNA, 1614 bp, synthetic construct
  misc_feature 1..1614: note = Variant of B-Glucocerebrosidase
  source 1..1614: mol_type = other DNA
atggagttttcttctcctagtagagaagaatgccccaagccactgagcagggtgagcatcatggctggatccctcacagggctgcttcttttgcaggcagtctcatgggcctctggagccaggccctgtattcccaagtcattcggctactcctcagtggtgtgtgtatgcaatgccacctattgtgacagtttcgatcctccaactctcagtgctctgggtaccttctcccggtatgagagcacaagaagtggaagacgcatggagctctcaatgggccctatacaggctaaccacactgggacaggtctgctgctgaccctccaacctgaacagaagtttcagaaagtcaagggatttggaggagccatgactgatgcagcagcactcaacatcttggccctgtctccaccagcccagaatctgctgttgaagtcctacttctcagaggaggggattggctacaacatcatccgggttcccatggctagctgtgacttctccattaggacctatacatacgctgacacccccgatgattttcagctccataatttcagtctccctgaagaagacaccaaactgaagatacctctgattcacagagccttgcaactgtcccaaaggccagtgagcctcttcgcttctccctggactagtcctacatggctgaagactaatggtgctgttaatgggaaaggctccctgaaaggacagccaggtgacatatatcatcagacatgggcccgctactttgtgaaattccttgatgcctatgcagagcacaagctccaattctgggcagtcaccgcagaaaacgagccctcagctgggctgctgtctggctacccctttcagtgcttgggctttactcctgagcatcaacgggacttcattgcccgggatttggggccaacactggccaacagcacccaccacaatgtaagactcctcatgctggatgaccagaggctgctgctccctcattgggccaaggtggtgttgacagacccagaagctgccaaatatgttcatggcatcgctgtccactggtacctggattttttggcccctgcaaaggctactctgggagagacccacagactcttccccaataccatgctgtttgcatcagaagcctgcgtggggagcaaattctgggagcagtctgttaggctgggttcctgggatcggggcatgcaatattcccatagtataataactaacctcctctaccacgtggtaggatggacagactggaatctggctttgaacccagaaggaggccccaattgggtgcgcaactttgttgacagccccatcattgtggatatcacaaaggacaccttctacaaacagcctatgttctatcatctggggcactttagcaagttcattccagagggttcccagagagtaggcttggttgcctcacagaagaatgatctggatgctgtggcactcctgcatcctgacgggagtgcagtggtggtagtactgaacaggtctagcaaagatgttcccttgactatcaaagacccagctgtgggctttctggaaaccatttcccctggatactctatccacacctatctctggagaagacagtaatga

SEQ ID NO: 460 - protein, 536 aa, synthetic construct
  REGION 1..536: note = Variant of B-Glucocerebrosidase
MEFSSPSREECPKPLSRVSIMAGSLTGLLLLQAVSWASGARPCIPKSFGYSSVVCVCNATYCDSFDPPTLSALGTFSRYESTRSGRRMELSMGPIQANHTGTGLLLTLQPEQKFQKVKGFGGAMTDAAALNILALSPPAQNLLLKSYFSEEGIGYNIIRVPMASCDFSIRTYTYADTPDDFQLHNFSLPEEDTKLKIPLIHRALQLSQRPVSLFASPWTSPTWLKTNGAVNGKGSLKGQPGDIYHQTWARYFVKFLDAYAEHKLQFWAVTAENEPSAGLLSGYPFQCLGFTPEHQRDFIARDLGPTLANSTHHNVRLLMLDDQRLLLPHWAKVVLTDPEAAKYVHGIAVHWYLDFLAPAKATLGETHRLFPNTMLFASEACVGSKFWEQSVRLGSWDRGMQYSHSIITNLLYHVVGWTDWNLALNPEGGPNWVRNFVDSPIIVDITKDTFYKQPMFYHLGHFSKFIPEGSQRVGLVASQKNDLDAVALLHPDGSAVVVVLNRSSKDVPLTIKDPAVGFLETISPGYSIHTYLWRRQ

SEQ ID NO: 461 - DNA, 1614 bp, synthetic construct
  misc_feature 1..1614: note = Variant of B-Glucocerebrosidase
  source 1..1614: mol_type = other DNA
atggagttttcttctcctagtagagaagaatgccccaagccactgagcagggtgagcatcatggctggatccctcacagggctgcttcttttgcaggcagtctcatgggcctctggagccaggccctgtattcccaagtcattcggctactcctcagtggtgtgtgtatgcaatgccacctattgtgacagtttcgatcctccaactctccctgctctgggtaccttctcccggcgtgagagcacaagaagtggaagacgcatggagctctcaatgggccctatacaggctaaccacactgggacaggtctgctgctgaccctccaacctgaacagaagtttcagaaagtcaagggatttggaggagccatgactgatgcagcagcactcaacatcttggccctgtctccaccagcccagaatctgctgttgaagtcctacttctcagaggaggggattggctacaacatcatccgggttcccatggctagctgtgacttctccattaggacctatacatacgctgacacccccgatgattttcagctccataatttcagtctccctgaagaagacaccaaactgaagatacctctgattcacagagccttgcaactgtcccaaaggccagtgagcctcttcgcttctccctggactagtcctacatggctgaagactaatggtgctgttaatgggaaaggctccctgaaaggacagccaggtgacatatatcatcagacatgggcccgctactttgtgaaattccttgatgcctatgcagagcacaagctccaattctgggcagtcaccgcagaaaacgagccctcagctgggctgctgtctggctacccctttcagtgcttgggctttactcctgagcatcaacgggacttcattgcccgggatttggggccaacactggccaacagcacccaccacaatgtaagactcctcatgctggatgaccagaggctgctgctccctcattgggccaaggtggtgttgacagacccagaagctgccaaatatgttcatggcatcgctgtccactggtacctggattttttggcccctgcaaaggctactctgggagagacccacagactcttccccaataccatgctgtttgcatcagaagcctgcgtggggagcaaattctgggagcagtctgttaggctgggttcctgggatcggggcatgcaatattcccatagtataataactaacctcctctaccacgtggtaggatggacagactggaatctggctttgaacccagaaggaggccccaattgggtgcgcaactttgttgacagccccatcattgtggatatcacaaaggacaccttctacaaacagcctatgttctatcatctggggcactttagcaagttcattccagagggttcccagagagtaggcttggttgcctcacagaagaatgatctggatgctgtggcactcctgcatcctgacgggagtgcagtggtggtagtactgaacaggtctagcaaagatgttcccttgactatcaaagacccagctgtgggctttctggaaaccatttcccctggatactctatccacacctatctctggagaagacagtaatga

SEQ ID NO: 462 - protein, 536 aa, synthetic construct
  REGION 1..536: note = Variant of B-Glucocerebrosidase
MEFSSPSREECPKPLSRVSIMAGSLTGLLLLQAVSWASGARPCIPKSFGYSSVVCVCNATYCDSFDPPTLPALGTFSRRESTRSGRRMELSMGPIQANHTGTGLLLTLQPEQKFQKVKGFGGAMTDAAALNILALSPPAQNLLLKSYFSEEGIGYNIIRVPMASCDFSIRTYTYADTPDDFQLHNFSLPEEDTKLKIPLIHRALQLSQRPVSLFASPWTSPTWLKTNGAVNGKGSLKGQPGDIYHQTWARYFVKFLDAYAEHKLQFWAVTAENEPSAGLLSGYPFQCLGFTPEHQRDFIARDLGPTLANSTHHNVRLLMLDDQRLLLPHWAKVVLTDPEAAKYVHGIAVHWYLDFLAPAKATLGETHRLFPNTMLFASEACVGSKFWEQSVRLGSWDRGMQYSHSIITNLLYHVVGWTDWNLALNPEGGPNWVRNFVDSPIIVDITKDTFYKQPMFYHLGHFSKFIPEGSQRVGLVASQKNDLDAVALLHPDGSAVVVVLNRSSKDVPLTIKDPAVGFLETISPGYSIHTYLWRRQ

SEQ ID NO: 463 - DNA, 1614 bp, synthetic construct
  misc_feature 1..1614: note = Variant of B-Glucocerebrosidase
  source 1..1614: mol_type = other DNA
atggagttttcttctcctagtagagaagaatgccccaagccactgagcagggtgagcatcatggctggatccctcacagggctgcttcttttgcaggcagtctcatgggcctctggagccaggccctgtattcccaagtcattcggctactcctcagtggtgtgtgtatgcaatgccacctattgtgacagtttcgatcctccaactctccctgctctgggtaccttctcccggtatgagagcacaagaagtggaagacgcatggagctctcaatgggccctatacaggctaaccacactgggacaggtctgctgctgaccctccaacctgaacagaagtttcagaaagtcaagggatttggaggagccatgactgatgcagcagcactcaacatcttggccctgtctccaccagcccagaatctgctgttgaagtcctacttctcagaggaggggattggctacaacatcatccgggttcccatggctagctgtgacttctccattaggacctatacatacgctgacacccccgattgttttcagctccataatttcagtctccctgaagaagacaccaaactgaagatacctctgattcacagagccttgcaactgtcccaaaggccagtgagcctcttcgcttctccctggactagtcctacatggctgaagactaatggtgctgttaatgggaaaggctccctgaaaggacagccaggtgacatatatcatcagacatgggcccgctactttgtgaaattccttgatgcctatgcagagcacaagctccaattctgggcagtcaccgcagaaaacgagccctcagctgggctgctgtctggctacccctttcagtgcttgggctttactcctgagcatcaacgggacttcattgcccgggatttggggccaacactggccaacagcacccaccacaatgtaagactcctcatgctggatgaccagaggctgctgctccctcattgggccaaggtggtgttgacagacccagaagctgccaaatatgttcatggcatcgctgtccactggtacctggattttttggcccctgcaaaggctactctgggagagacccacagactcttccccaataccatgctgtttgcatcagaagcctgcgtggggagcaaattctgggagcagtctgttaggctgggttcctgggatcggggcatgcaatattcccatagtataataactaacctcctctaccacgtggtaggatggacagactggaatctggctttgaacccagaaggaggccccaattgggtgcgcaactttgttgacagccccatcattgtggatatcacaaaggacaccttctacaaacagcctatgttctatcatctggggcactttagcaagttcattccagagggttcccagagagtaggcttggttgcctcacagaagaatgatctggatgctgtggcactcctgcatcctgacgggagtgcagtggtggtagtactgaacaggtctagcaaagatgttcccttgactatcaaagacccagctgtgggctttctggaaaccatttcccctggatactctatccacacctatctctggagaagacagtaatga

SEQ ID NO: 464 - protein, 536 aa, synthetic construct
  REGION 1..536: note = Variant of B-Glucocerebrosidase
MEFSSPSREECPKPLSRVSIMAGSLTGLLLLQAVSWASGARPCIPKSFGYSSVVCVCNATYCDSFDPPTLPALGTFSRYESTRSGRRMELSMGPIQANHTGTGLLLTLQPEQKFQKVKGFGGAMTDAAALNILALSPPAQNLLLKSYFSEEGIGYNIIRVPMASCDFSIRTYTYADTPDCFQLHNFSLPEEDTKLKIPLIHRALQLSQRPVSLFASPWTSPTWLKTNGAVNGKGSLKGQPGDIYHQTWARYFVKFLDAYAEHKLQFWAVTAENEPSAGLLSGYPFQCLGFTPEHQRDFIARDLGPTLANSTHHNVRLLMLDDQRLLLPHWAKVVLTDPEAAKYVHGIAVHWYLDFLAPAKATLGETHRLFPNTMLFASEACVGSKFWEQSVRLGSWDRGMQYSHSIITNLLYHVVGWTDWNLALNPEGGPNWVRNFVDSPIIVDITKDTFYKQPMFYHLGHFSKFIPEGSQRVGLVASQKNDLDAVALLHPDGSAVVVVLNRSSKDVPLTIKDPAVGFLETISPGYSIHTYLWRRQ

SEQ ID NO: 465 - DNA, 1614 bp, synthetic construct
  misc_feature 1..1614: note = Variant of B-Glucocerebrosidase
  source 1..1614: mol_type = other DNA
atggagttttcttctcctagtagagaagaatgccccaagccactgagcagggtgagcatcatggctggatccctcacagggctgcttcttttgcaggcagtctcatgggcctctggagccaggccctgtattcccaagtcattcggctactcctcagtggtgtgtgtatgcaatgccacctattgtgacagtttcgatcctccaactctccctgctctgggtaccttctcccggtatgagagcacaagaagtggaagacgcatggagctctcaatgggccctatacaggctaaccacactgggacaggtctgctgctgaccctccaacctgaacagaagtttcagaaagtcaagggatttggaggagccatgactgatgcagcagcactcaacatcttggccctgtctccaccagcccagaatctgctgttgaagtcctacttctcagaggaggggattggctacaacatcatccgggttcccatggctagctgtgacttctccattaggacctatacatacgctgacacccccgatgattttcagctccataatttcagtctccctgaagaagacaccaaactgaagatacctctgattcacagagccttgcaactgtcccaaaggccagtgagcctcttcgcttctccctggactagtcctacatggctgaagactaatggtgctgttaatgggaaaggctccctgaaaggacagccaggtgacatatatcatcagacatgggcccgctactttgtgaaattccttgatgcctatgcagagcacaagctccaattctgggcagtcaccgcagaaaacgagccctcagctgggctgctgtctggctacccctttcagtgcttgggctttactcctgagcatcaacgggacttcattgcccgggatttggggccaacactggccaacagcacccaccacaatgtaagactcctcatgctggatgaccagaggctgctgctccctcattgggccaaggtggtgttgacagacccagaagctgccaaatatgttcatggcatcgctgtccactggtacctggattttttggcccctgcaaaggctactctgggagagacccacagactcttccccaataccatgctgtttgcatcagaagcctgcgtggggagcaaattctgggagcagtctgttaggctgggttcctgggatcggggcatgcaatattcccatagtataataactaacctcctctaccacgtggtaggatggacagactggaatctggctttgaacccagaaggaggccccaattgggtgcgcaactttgttgacagccccatcattgtggatatcacaaaggacaccttctacaaacagcctatgttctatcatctggggcactttagcaagttcattccagagggttcccagagagtaggcttggttgcctcacagaagaatgatctggatgctgtggcactcctgcatcctgacgggagtgcagtggtggtagtactgaacaggtctagcaaagatgttcccggtactatcaaagacccagctgtgggctttctggaaaccatttcccctggatactctatccacacctatctctggagaagacagtaatga

SEQ ID NO: 466 - protein, 536 aa, synthetic construct
  REGION 1..536: note = Variant of B-Glucocerebrosidase
MEFSSPSREECPKPLSRVSIMAGSLTGLLLLQAVSWASGARPCIPKSFGYSSVVCVCNATYCDSFDPPTLPALGTFSRYESTRSGRRMELSMGPIQANHTGTGLLLTLQPEQKFQKVKGFGGAMTDAAALNILALSPPAQNLLLKSYFSEEGIGYNIIRVPMASCDFSIRTYTYADTPDDFQLHNFSLPEEDTKLKIPLIHRALQLSQRPVSLFASPWTSPTWLKTNGAVNGKGSLKGQPGDIYHQTWARYFVKFLDAYAEHKLQFWAVTAENEPSAGLLSGYPFQCLGFTPEHQRDFIARDLGPTLANSTHHNVRLLMLDDQRLLLPHWAKVVLTDPEAAKYVHGIAVHWYLDFLAPAKATLGETHRLFPNTMLFASEACVGSKFWEQSVRLGSWDRGMQYSHSIITNLLYHVVGWTDWNLALNPEGGPNWVRNFVDSPIIVDITKDTFYKQPMFYHLGHFSKFIPEGSQRVGLVASQKNDLDAVALLHPDGSAVVVVLNRSSKDVPGTIKDPAVGFLETISPGYSIHTYLWRRQ

SEQ ID NO: 467 - DNA, 1614 bp, synthetic construct
  misc_feature 1..1614: note = Variant of B-Glucocerebrosidase
  source 1..1614: mol_type = other DNA
atggagttttcttctcctagtagagaagaatgccccaagccactgagcagggtgagcatcatggctggatccctcacagggctgcttcttttgcaggcagtctcatgggcctctggagccaggccctgtattcccaagtcattcggctactcctcagtggtgtgtgtatgcaatgccacctattgtgacagtttcgatcctccaactctccctgctctgggtaccttctcccggtatgagagcacaagaagtggaagacgcatggagctctcaatgggccctatacaggctaaccacactgggacaggtctgctgctgaccctccaacctgaacagaagtttcagaaagtcaagggatttggaggagccatgactgatgcagcagcactcaacatcttggccctgtctccaccagcccagaatctgctgttgaagtcctacttctcagaggaggggattggctacaacatcatccgggttcccatggctagctgtgacttctccattaggacctatacatacgctgacacccccgatgattttcagctccataatttcagtctccctgaagaagacaccaaactgaagatacctctgattcacagagccttgcaacgttcccaaaggccagtgagcctcttcgcttctccctggactagtcctacatggctgaagactaatggtgctgttaatgggaaaggctccctgaaaggacagccaggtgacatatatcatcagacatgggcccgctactttgtgaaattccttgatgcctatgcagagcacaagctccaattctgggcagtcaccgcagaaaacgagccctcagctgggctgctgtctggctacccctttcagtgcttgggctttactcctgagcatcaacgggacttcattgcccgggatttggggccaacactggccaacagcacccaccacaatgtaagactcctcatgctggatgaccagaggctgctgctccctcattgggccaaggtggtgttgacagacccagaagctgccaaatatgttcatggcatcgctgtccactggtacctggattttttggcccctgcaaaggctactctgggagagacccacagactcttccccaataccatgctgtttgcatcagaagcctgcgtggggagcaaattctgggagcagtctgttaggctgggttcctgggatcggggcatgcaatattcccatagtataataactaacctcctctaccacgtggtaggatggacagactggaatctggctttgaacccagaaggaggccccaattgggtgcgcaactttgttgacagccccatcattgtggatatcacaaaggacaccttctacaaacagcctatgttctatcatctggggcactttagcaagttcattccagagggttcccagagagtaggcttggttgcctcacagaagaatgatctggatgctgtggcactcctgcatcctgacgggagtgcagtggtggtagtactgaacaggtctagcaaagatgttcccttgactatcaaagacccagctgtgggctttctggaaaccatttcccctggatactctatccacacctatctctggagaagacagtaatga

SEQ ID NO: 468 - protein, 536 aa, synthetic construct
  REGION 1..536: note = Variant of B-Glucocerebrosidase
MEFSSPSREECPKPLSRVSIMAGSLTGLLLLQAVSWASGARPCIPKSFGYSSVVCVCNATYCDSFDPPTLPALGTFSRYESTRSGRRMELSMGPIQANHTGTGLLLTLQPEQKFQKVKGFGGAMTDAAALNILALSPPAQNLLLKSYFSEEGIGYNIIRVPMASCDFSIRTYTYADTPDDFQLHNFSLPEEDTKLKIPLIHRALQRSQRPVSLFASPWTSPTWLKTNGAVNGKGSLKGQPGDIYHQTWARYFVKFLDAYAEHKLQFWAVTAENEPSAGLLSGYPFQCLGFTPEHQRDFIARDLGPTLANSTHHNVRLLMLDDQRLLLPHWAKVVLTDPEAAKYVHGIAVHWYLDFLAPAKATLGETHRLFPNTMLFASEACVGSKFWEQSVRLGSWDRGMQYSHSIITNLLYHVVGWTDWNLALNPEGGPNWVRNFVDSPIIVDITKDTFYKQPMFYHLGHFSKFIPEGSQRVGLVASQKNDLDAVALLHPDGSAVVVVLNRSSKDVPLTIKDPAVGFLETISPGYSIHTYLWRRQ

SEQ ID NO: 469 - DNA, 1614 bp, synthetic construct
  misc_feature 1..1614: note = Variant of B-Glucocerebrosidase
  source 1..1614: mol_type = other DNA
atggagttttcttctcctagtagagaagaatgccccaagccactgagcagggtgagcatcatggctggatccctcacagggctgcttcttttgcaggcagtctcatgggcctctggagccaggccctgtattcccaagtcattcggctactcctcagtggtgtgtgtatgcaatgccacctattgtgacagtttcgatcctccaactctccctgctctgggtaccttctcccggtatgagagcacaagaagtggaagacgcatggagctctcaatgggccctatacaggctaaccacactgggacaggtctgctgctgaccctccaacctgaacagaagtttcagaaagtcaagggatttggaggagccatgactgatgcagcagcactcaacatcttggccctgtctccaccagcccagaatctgctgttgaagtcctacttctcagaggaggggattggctacaacatcatccgggttcccatggctagctgtgacttctccattaggacctatacatacgctgacacccccgatgattttcagctccataatttcagtctccctgaagaagacaccaaactgaagatacctctgattcacagagccttgcaactgtcccaaaggccaaatagcctcttcgcttctccctggactagtcctacatggctgaagactaatggtgctgttaatgggaaaggctccctgaaaggacagccaggtgacatatatcatcagacatgggcccgctactttgtgaaattccttgatgcctatgcagagcacaagctccaattctgggcagtcaccgcagaaaacgagccctcagctgggctgctgtctggctacccctttcagtgcttgggctttactcctgagcatcaacgggacttcattgcccgggatttggggccaacactggccaacagcacccaccacaatgtaagactcctcatgctggatgaccagaggctgctgctccctcattgggccaaggtggtgttgacagacccagaagctgccaaatatgttcatggcatcgctgtccactggtacctggattttttggcccctgcaaaggctactctgggagagacccacagactcttccccaataccatgctgtttgcatcagaagcctgcgtggggagcaaattctgggagcagtctgttaggctgggttcctgggatcggggcatgcaatattcccatagtataataactaacctcctctaccacgtggtaggatggacagactggaatctggctttgaacccagaaggaggccccaattgggtgcgcaactttgttgacagccccatcattgtggatatcacaaaggacaccttctacaaacagcctatgttctatcatctggggcactttagcaagttcattccagagggttcccagagagtaggcttggttgcctcacagaagaatgatctggatgctgtggcactcctgcatcctgacgggagtgcagtggtggtagtactgaacaggtctagcaaagatgttcccttgactatcaaagacccagctgtgggctttctggaaaccatttcccctggatactctatccacacctatctctggagaagacagtaatga

SEQ ID NO: 470 - protein, 536 aa, synthetic construct
  REGION 1..536: note = Variant of B-Glucocerebrosidase
MEFSSPSREECPKPLSRVSIMAGSLTGLLLLQAVSWASGARPCIPKSFGYSSVVCVCNATYCDSFDPPTLPALGTFSRYESTRSGRRMELSMGPIQANHTGTGLLLTLQPEQKFQKVKGFGGAMTDAAALNILALSPPAQNLLLKSYFSEEGIGYNIIRVPMASCDFSIRTYTYADTPDDFQLHNFSLPEEDTKLKIPLIHRALQLSQRPNSLFASPWTSPTWLKTNGAVNGKGSLKGQPGDIYHQTWARYFVKFLDAYAEHKLQFWAVTAENEPSAGLLSGYPFQCLGFTPEHQRDFIARDLGPTLANSTHHNVRLLMLDDQRLLLPHWAKVVLTDPEAAKYVHGIAVHWYLDFLAPAKATLGETHRLFPNTMLFASEACVGSKFWEQSVRLGSWDRGMQYSHSIITNLLYHVVGWTDWNLALNPEGGPNWVRNFVDSPIIVDITKDTFYKQPMFYHLGHFSKFIPEGSQRVGLVASQKNDLDAVALLHPDGSAVVVVLNRSSKDVPLTIKDPAVGFLETISPGYSIHTYLWRRQ

SEQ ID NO: 471 - DNA, 1614 bp, synthetic construct
  misc_feature 1..1614: note = Variant of B-Glucocerebrosidase
  source 1..1614: mol_type = other DNA
atggagttttcttctcctagtagagaagaatgccccaagccactgagcagggtgagcatcatggctggatccctcacagggctgcttcttttgcaggcagtctcatgggcctctggagccaggccctgtattcccaagtcattcggctactcctcagtggtgtgtgtatgcaatgccacctattgtgacagtttcgatcctccaactctccctgctctgggtaccttctcccggtatgagagcacaagaagtggaagacgcatggagctctcaatgggccctatacaggctaaccacactgggacaggtctgctgctgaccctccaacctgaacagaagtttcagaaagtcaagggatttggaggagccatgactgatgcagcagcactcaacatcttggccctgtctccaccagcccagaatctgctgttgaagtcctacttctcagaggaggggattggctacaacatcatccgggttcccatggctagctgtgacttctccattaggacctctacatacgctgacacccccgatgattttcagctccataatttcagtctccctgaagaagacaccaaactgaagatacctctgattcacagagccttgcaactgtcccaaaggccagtgagcctcttcgcttctccctggactagtcctacatggctgaagactaatggtgctgttaatgggaaaggctccctgaaaggacagccaggtgacatatatcatcagacatgggcccgctactttgtgaaattccttgatgcctatgcagagcacaagctccaattctgggcagtcaccgcagaaaacgagccctcagctgggctgctgtctggctacccctttcagtgcttgggctttactcctgagcatcaacgggacttcattgcccgggatttggggccaacactggccaacagcacccaccacaatgtaagactcctcatgctggatgaccagaggctgctgctccctcattgggccaaggtggtgttgacagacccagaagctgccaaatatgttcatggcatcgctgtccactggtacctggattttttggcccctgcaaaggctactctgggagagacccacagactcttccccaataccatgctgtttgcatcagaagcctgcgtggggagcaaattctgggagcagtctgttaggctgggttcctgggatcggggcatgcaatattcccatagtataataactaacctcctctaccacgtggtaggatggacagactggaatctggctttgaacccagaaggaggccccaattgggtgcgcaactttgttgacagccccatcattgtggatatcacaaaggacaccttctacaaacagcctatgttctatcatctggggcactttagcaagttcattccagagggttcccagagagtaggcttggttgcctcacagaagaatgatctggatgctgtggcactcctgcatcctgacgggagtgcagtggtggtagtactgaacaggtctagcaaagatgttcccttgactatcaaagacccagctgtgggctttctggaaaccatttcccctggatactctatccacacctatctctggagaagacagtaatga

SEQ ID NO: 472 - protein, 536 aa, synthetic construct
  REGION 1..536: note = Variant of B-Glucocerebrosidase
MEFSSPSREECPKPLSRVSIMAGSLTGLLLLQAVSWASGARPCIPKSFGYSSVVCVCNATYCDSFDPPTLPALGTFSRYESTRSGRRMELSMGPIQANHTGTGLLLTLQPEQKFQKVKGFGGAMTDAAALNILALSPPAQNLLLKSYFSEEGIGYNIIRVPMASCDFSIRTSTYADTPDDFQLHNFSLPEEDTKLKIPLIHRALQLSQRPVSLFASPWTSPTWLKTNGAVNGKGSLKGQPGDIYHQTWARYFVKFLDAYAEHKLQFWAVTAENEPSAGLLSGYPFQCLGFTPEHQRDFIARDLGPTLANSTHHNVRLLMLDDQRLLLPHWAKVVLTDPEAAKYVHGIAVHWYLDFLAPAKATLGETHRLFPNTMLFASEACVGSKFWEQSVRLGSWDRGMQYSHSIITNLLYHVVGWTDWNLALNPEGGPNWVRNFVDSPIIVDITKDTFYKQPMFYHLGHFSKFIPEGSQRVGLVASQKNDLDAVALLHPDGSAVVVVLNRSSKDVPLTIKDPAVGFLETISPGYSIHTYLWRRQ

SEQ ID NO: 473 - DNA, 1614 bp, synthetic construct
  misc_feature 1..1614: note = Variant of B-Glucocerebrosidase
  source 1..1614: mol_type = other DNA
atggagttttcttctcctagtagagaagaatgccccaagccactgagcagggtgagcatcatggctggatccctcacagggctgcttcttttgcaggcagtctcatgggcctctggagccaggccctgtattcccaagtcattcggctactcctcagtggtgtgtgtatgcaatgccacctattgtgacagtttcgatcctccaactctccctgctctgggtaccttctcccggtatgagagcacaagaagtggaagacgcatggagctctcaatgggccctatacaggctaaccacactgggacaggtctgctgctgaccctccaacctgaacagaagtttcagaaagtcaagggatttggaggagccatgactgatgcagcagcactcaacatcttggccctgtctccaccagcccagaatctgctgttgaagtcctacttctcagaggaggggattggctacaacatcatccgggttcccatggctagctgtgacttctccattaggacctatacatacgctgacacccccgatgattttcagctccataatttcagtctccctgaagaagacaccaaactgaagatacctctgattcacagagccttgcaactgtcccaaaggccagtgagcctcttcgcttctccctggactagtcctacatggctgaagactaatggtgctgttaatgggaaaggctccctgaaaggacagccaggtgacatatatcatcagacatgggcccgctactttgtgaaattccttgatgcctatgcagagcacaagctccaattctgggcagtcaccgcagaaaacgagccctcagctgggctgctgtctggctacccctttcagtgcttgggctttactcctgagcatcaacgggacttcattgcccgggatttggggccaacactggccaacagcacccaccacaatgtaagactcctcatgctggatgaccagaggctgctgctccctcattgggccaaggtggtgttgacagacccagaagctgccaaatatgttcatggcatcgctgtccactggtacctggattttttggcccctgcaaaggctactctgggagagacccacagactcttccccaataccatgctgtttgcatcagaagcctgcgtggggagcaaattctgggagcagtctgttaggctgggttcctgggatcggggcatgcaatattcccatagtataataactaacctcctctaccacgtggtaggatggacagactggaatctggctttgaacccagaaggaggccccaattgggtgcgcaactttgttgacagccccatcattgtggatatcacaaaggacaccttctacaaacagcctatgttctatcatctggggcactttagcaagttcattccagagggttcccagagagtaggcttggttgcctcacagaagaatgatctggatgctgtggcactcctgcggcctgacgggagtgcagtggtggtagtactgaacaggtctagcaaagatgttcccttgactatcaaagacccagctgtgggctttctggaaaccatttcccctggatactctatccacacctatctctggagaagacagtaatga

SEQ ID NO: 474 - protein, 536 aa, synthetic construct
  REGION 1..536: note = Variant of B-Glucocerebrosidase
MEFSSPSREECPKPLSRVSIMAGSLTGLLLLQAVSWASGARPCIPKSFGYSSVVCVCNATYCDSFDPPTLPALGTFSRYESTRSGRRMELSMGPIQANHTGTGLLLTLQPEQKFQKVKGFGGAMTDAAALNILALSPPAQNLLLKSYFSEEGIGYNIIRVPMASCDFSIRTYTYADTPDDFQLHNFSLPEEDTKLKIPLIHRALQLSQRPVSLFASPWTSPTWLKTNGAVNGKGSLKGQPGDIYHQTWARYFVKFLDAYAEHKLQFWAVTAENEPSAGLLSGYPFQCLGFTPEHQRDFIARDLGPTLANSTHHNVRLLMLDDQRLLLPHWAKVVLTDPEAAKYVHGIAVHWYLDFLAPAKATLGETHRLFPNTMLFASEACVGSKFWEQSVRLGSWDRGMQYSHSIITNLLYHVVGWTDWNLALNPEGGPNWVRNFVDSPIIVDITKDTFYKQPMFYHLGHFSKFIPEGSQRVGLVASQKNDLDAVALLRPDGSAVVVVLNRSSKDVPLTIKDPAVGFLETISPGYSIHTYLWRRQ

SEQ ID NO: 475 - DNA, 1614 bp, synthetic construct
  misc_feature 1..1614: note = Variant of B-Glucocerebrosidase
  source 1..1614: mol_type = other DNA
atggagttttcttctcctagtagagaagaatgccccaagccactgagcagggtgagcatcatggctggatccctcacagggctgcttcttttgcaggcagtctcatgggcctctggagccaggccctgtattcccaagtcattcggctactcctcagtggtgtgtgtatgcaatgccacctattgtgacagtttcgatcctccaactctccctgctctgggtaccttctcccggtatgagagcacaagaagtggaagacgcatggagctctcaatgggccctatacaggctaaccacactgggacaggtctgctgctgaccctccaacctgaacagaagtttcagaaagtcaagggatttggaggagccatgactgatgcagcagcactcaacatcttggccctgtctccaccagcccagaatctgctgttgaagtcctacttctcagaggaggggattggctacaacatcatccgggttcccatggctagctgtgacttctccattaggacctatacatacgctgacacccccgatgattttcagctccataatttcagtctccctgaagaagacaccaaactgaagatacctctgattcacagagccttgcaactggatcaaaggccagtgagcctcttcgcttctccctggactagtcctacatggctgaagactaatggtgctgttaatgggaaaggctccctgaaaggacagccaggtgacatatatcatcagacatgggcccgctactttgtgaaattccttgatgcctatgcagagcacaagctccaattctgggcagtcaccgcagaaaacgagccctcagctgggctgctgtctggctacccctttcagtgcttgggctttactcctgagcatcaacgggacttcattgcccgggatttggggccaacactggccaacagcacccaccacaatgtaagactcctcatgctggatgaccagaggctgctgctccctcattgggccaaggtggtgttgacagacccagaagctgccaaatatgttcatggcatcgctgtccactggtacctggattttttggcccctgcaaaggctactctgggagagacccacagactcttccccaataccatgctgtttgcatcagaagcctgcgtggggagcaaattctgggagcagtctgttaggctgggttcctgggatcggggcatgcaatattcccatagtataataactaacctcctctaccacgtggtaggatggacagactggaatctggctttgaacccagaaggaggccccaattgggtgcgcaactttgttgacagccccatcattgtggatatcacaaaggacaccttctacaaacagcctatgttctatcatctggggcactttagcaagttcattccagagggttcccagagagtaggcttggttgcctcacagaagaatgatctggatgctgtggcactcctgcatcctgacgggagtgcagtggtggtagtactgaacaggtctagcaaagatgttcccttgactatcaaagacccagctgtgggctttctggaaaccatttcccctggatactctatccacacctatctctggagaagacagtaatga

SEQ ID NO: 476 - protein, 536 aa, synthetic construct
  REGION 1..536: note = Variant of B-Glucocerebrosidase
MEFSSPSREECPKPLSRVSIMAGSLTGLLLLQAVSWASGARPCIPKSFGYSSVVCVCNATYCDSFDPPTLPALGTFSRYESTRSGRRMELSMGPIQANHTGTGLLLTLQPEQKFQKVKGFGGAMTDAAALNILALSPPAQNLLLKSYFSEEGIGYNIIRVPMASCDFSIRTYTYADTPDDFQLHNFSLPEEDTKLKIPLIHRALQLDQRPVSLFASPWTSPTWLKTNGAVNGKGSLKGQPGDIYHQTWARYFVKFLDAYAEHKLQFWAVTAENEPSAGLLSGYPFQCLGFTPEHQRDFIARDLGPTLANSTHHNVRLLMLDDQRLLLPHWAKVVLTDPEAAKYVHGIAVHWYLDFLAPAKATLGETHRLFPNTMLFASEACVGSKFWEQSVRLGSWDRGMQYSHSIITNLLYHVVGWTDWNLALNPEGGPNWVRNFVDSPIIVDITKDTFYKQPMFYHLGHFSKFIPEGSQRVGLVASQKNDLDAVALLHPDGSAVVVVLNRSSKDVPLTIKDPAVGFLETISPGYSIHTYLWRRQ

SEQ ID NO: 477 - DNA, 1614 bp, synthetic construct
  misc_feature 1..1614: note = Variant of B-Glucocerebrosidase
  source 1..1614: mol_type = other DNA
atggagttttcttctcctagtagagaagaatgccccaagccactgagcagggtgagcatcatggctggatccctcacagggctgcttcttttgcaggcagtctcatgggcctctggagccaggccctgtattcccaagtcattcggctactcctcagtggtgtgtgtatgcaatgccacctattgtgacagtttcgatcctccaactctccctgctctgggtaccttctcccggtatgagagcacaagaagtggaagacgcatggagctctcaatgggccctatacaggctaaccacactgggacaggtctgctgctgaccctccaacctgaacagaagtttgtgaaagtcaagggatttggaggagccatgactgatgcagcagcactcaacatcttggccctgtctccaccagcccagaatctgctgttgaagtcctacttctcagaggaggggattggctacaacatcatccgggttcccatggctagctgtgacttctccattaggacctatacatacgctgacacccccgatgattttcagctccataatttcagtctccctgaagaagacaccaaactgaagatacctctgattcacagagccttgcaactgtcccaaaggccagtgagcctcttcgcttctccctggactagtcctacatggctgaagactaatggtgctgttaatgggaaaggctccctgaaaggacagccaggtgacatatatcatcagacatgggcccgctactttgtgaaattccttgatgcctatgcagagcacaagctccaattctgggcagtcaccgcagaaaacgagccctcagctgggctgctgtctggctacccctttcagtgcttgggctttactcctgagcatcaacgggacttcattgcccgggatttggggccaacactggccaacagcacccaccacaatgtaagactcctcatgctggatgaccagaggctgctgctccctcattgggccaaggtggtgttgacagacccagaagctgccaaatatgttcatggcatcgctgtccactggtacctggattttttggcccctgcaaaggctactctgggagagacccacagactcttccccaataccatgctgtttgcatcagaagcctgcgtggggagcaaattctgggagcagtctgttaggctgggttcctgggatcggggcatgcaatattcccatagtataataactaacctcctctaccacgtggtaggatggacagactggaatctggctttgaacccagaaggaggccccaattgggtgcgcaactttgttgacagccccatcattgtggatatcacaaaggacaccttctacaaacagcctatgttctatcatctggggcactttagcaagttcattccagagggttcccagagagtaggcttggttgcctcacagaagaatgatctggatgctgtggcactcctgcatcctgacgggagtgcagtggtggtagtactgaacaggtctagcaaagatgttcccttgactatcaaagacccagctgtgggctttctggaaaccatttcccctggatactctatccacacctatctctggagaagacagtaatga

SEQ ID NO: 478 - protein, 536 aa, synthetic construct
  REGION 1..536: note = Variant of B-Glucocerebrosidase
MEFSSPSREECPKPLSRVSIMAGSLTGLLLLQAVSWASGARPCIPKSFGYSSVVCVCNATYCDSFDPPTLPALGTFSRYESTRSGRRMELSMGPIQANHTGTGLLLTLQPEQKFVKVKGFGGAMTDAAALNILALSPPAQNLLLKSYFSEEGIGYNIIRVPMASCDFSIRTYTYADTPDDFQLHNFSLPEEDTKLKIPLIHRALQLSQRPVSLFASPWTSPTWLKTNGAVNGKGSLKGQPGDIYHQTWARYFVKFLDAYAEHKLQFWAVTAENEPSAGLLSGYPFQCLGFTPEHQRDFIARDLGPTLANSTHHNVRLLMLDDQRLLLPHWAKVVLTDPEAAKYVHGIAVHWYLDFLAPAKATLGETHRLFPNTMLFASEACVGSKFWEQSVRLGSWDRGMQYSHSIITNLLYHVVGWTDWNLALNPEGGPNWVRNFVDSPIIVDITKDTFYKQPMFYHLGHFSKFIPEGSQRVGLVASQKNDLDAVALLHPDGSAVVVVLNRSSKDVPLTIKDPAVGFLETISPGYSIHTYLWRRQ

SEQ ID NO: 479 - DNA, 1614 bp, synthetic construct
  misc_feature 1..1614: note = Variant of B-Glucocerebrosidase
  source 1..1614: mol_type = other DNA
atggagttttcttctcctagtagagaagaatgccccaagccactgagcagggtgagcatcatggctggatccctcacagggctgcttcttttgcaggcagtctcatgggcctctggagccaggccctgtattcccaagtcattcggctactcctcagtggtgtgtgtatgcaatgccacctattgtcttagtttcgatcctccaactctccctgctctgggtaccttctcccggtatgagagcacaagaagtggaagacgcatggagctctcaatgggccctatacaggctaaccacactgggacaggtctgctgctgaccctccaacctgaacagaagtttcagaaagtcaagggatttggaggagccatgactgatgcagcagcactcaacatcttggccctgtctccaccagcccagaatctgctgttgaagtcctacttctcagaggaggggattggctacaacatcatccgggttcccatggctagctgtgacttctccattaggacctatacatacgctgacacccccgatgattttcagctccataatttcagtctccctgaagaagacaccaaactgaagatacctctgattcacagagccttgcaactgtcccaaaggccagtgagcctcttcgcttctccctggactagtcctacatggctgaagactaatggtgctgttaatgggaaaggctccctgaaaggacagccaggtgacatatatcatcagacatgggcccgctactttgtgaaattccttgatgcctatgcagagcacaagctccaattctgggcagtcaccgcagaaaacgagccctcagctgggctgctgtctggctacccctttcagtgcttgggctttactcctgagcatcaacgggacttcattgcccgggatttggggccaacactggccaacagcacccaccacaatgtaagactcctcatgctggatgaccagaggctgctgctccctcattgggccaaggtggtgttgacagacccagaagctgccaaatatgttcatggcatcgctgtccactggtacctggattttttggcccctgcaaaggctactctgggagagacccacagactcttccccaataccatgctgtttgcatcagaagcctgcgtggggagcaaattctgggagcagtctgttaggctgggttcctgggatcggggcatgcaatattcccatagtataataactaacctcctctaccacgtggtaggatggacagactggaatctggctttgaacccagaaggaggccccaattgggtgcgcaactttgttgacagccccatcattgtggatatcacaaaggacaccttctacaaacagcctatgttctatcatctggggcactttagcaagttcattccagagggttcccagagagtaggcttggttgcctcacagaagaatgatctggatgctgtggcactcctgcatcctgacgggagtgcagtggtggtagtactgaacaggtctagcaaagatgttcccttgactatcaaagacccagctgtgggctttctggaaaccatttcccctggatactctatccacacctatctctggagaagacagtaatga

SEQ ID NO: 480 - protein, 536 aa, synthetic construct
  REGION 1..536: note = Variant of B-Glucocerebrosidase
MEFSSPSREECPKPLSRVSIMAGSLTGLLLLQAVSWASGARPCIPKSFGYSSVVCVCNATYCLSFDPPTLPALGTFSRYESTRSGRRMELSMGPIQANHTGTGLLLTLQPEQKFQKVKGFGGAMTDAAALNILALSPPAQNLLLKSYFSEEGIGYNIIRVPMASCDFSIRTYTYADTPDDFQLHNFSLPEEDTKLKIPLIHRALQLSQRPVSLFASPWTSPTWLKTNGAVNGKGSLKGQPGDIYHQTWARYFVKFLDAYAEHKLQFWAVTAENEPSAGLLSGYPFQCLGFTPEHQRDFIARDLGPTLANSTHHNVRLLMLDDQRLLLPHWAKVVLTDPEAAKYVHGIAVHWYLDFLAPAKATLGETHRLFPNTMLFASEACVGSKFWEQSVRLGSWDRGMQYSHSIITNLLYHVVGWTDWNLALNPEGGPNWVRNFVDSPIIVDITKDTFYKQPMFYHLGHFSKFIPEGSQRVGLVASQKNDLDAVALLHPDGSAVVVVLNRSSKDVPLTIKDPAVGFLETISPGYSIHTYLWRRQ

SEQ ID NO: 481 - DNA, 1614 bp, synthetic construct
  misc_feature 1..1614: note = Variant of B-Glucocerebrosidase
  source 1..1614: mol_type = other DNA
atggagttttcttctcctagtagagaagaatgccccaagccactgagcagggtgagcatcatggctggatccctcacagggctgcttcttttgcaggcagtctcatgggcctctggagccaggccctgtattcccaagtcattcggctactcctcagtggtgtgtgtatgcaatgccacctattgtgacagtttcgatcctccaactctccctgctctgggtaccttctcccggtatgagagcacaagaagtggaagacgcatggagctctcaatgggccctatacaggctaaccacactgggacaggtctgctgctgaccctccaacctgaacagaagtttcagaaagtcaagggatttggaggagccatgactgatgcagcagcactcaacatcttggccctgtctccaccagcccagaatgcgctgttgaagtcctacttctcagaggaggggattggctacaacatcatccgggttcccatggctagctgtgacttctccattaggacctatacatacgctgacacccccgatgattttcagctccataatttcagtctccctgaagaagacaccaaactgaagatacctctgattcacagagccttgcaactgtcccaaaggccagtgagcctcttcgcttctccctggactagtcctacatggctgaagactaatggtgctgttaatgggaaaggctccctgaaaggacagccaggtgacatatatcatcagacatgggcccgctactttgtgaaattccttgatgcctatgcagagcacaagctccaattctgggcagtcaccgcagaaaacgagccctcagctgggctgctgtctggctacccctttcagtgcttgggctttactcctgagcatcaacgggacttcattgcccgggatttggggccaacactggccaacagcacccaccacaatgtaagactcctcatgctggatgaccagaggctgctgctccctcattgggccaaggtggtgttgacagacccagaagctgccaaatatgttcatggcatcgctgtccactggtacctggattttttggcccctgcaaaggctactctgggagagacccacagactcttccccaataccatgctgtttgcatcagaagcctgcgtggggagcaaattctgggagcagtctgttaggctgggttcctgggatcggggcatgcaatattcccatagtataataactaacctcctctaccacgtggtaggatggacagactggaatctggctttgaacccagaaggaggccccaattgggtgcgcaactttgttgacagccccatcattgtggatatcacaaaggacaccttctacaaacagcctatgttctatcatctggggcactttagcaagttcattccagagggttcccagagagtaggcttggttgcctcacagaagaatgatctggatgctgtggcactcctgcatcctgacgggagtgcagtggtggtagtactgaacaggtctagcaaagatgttcccttgactatcaaagacccagctgtgggctttctggaaaccatttcccctggatactctatccacacctatctctggagaagacagtaatga

SEQ ID NO: 482 - protein, 536 aa, synthetic construct
  REGION 1..536: note = Variant of B-Glucocerebrosidase
MEFSSPSREECPKPLSRVSIMAGSLTGLLLLQAVSWASGARPCIPKSFGYSSVVCVCNATYCDSFDPPTLPALGTFSRYESTRSGRRMELSMGPIQANHTGTGLLLTLQPEQKFQKVKGFGGAMTDAAALNILALSPPAQNALLKSYFSEEGIGYNIIRVPMASCDFSIRTYTYADTPDDFQLHNFSLPEEDTKLKIPLIHRALQLSQRPVSLFASPWTSPTWLKTNGAVNGKGSLKGQPGDIYHQTWARYFVKFLDAYAEHKLQFWAVTAENEPSAGLLSGYPFQCLGFTPEHQRDFIARDLGPTLANSTHHNVRLLMLDDQRLLLPHWAKVVLTDPEAAKYVHGIAVHWYLDFLAPAKATLGETHRLFPNTMLFASEACVGSKFWEQSVRLGSWDRGMQYSHSIITNLLYHVVGWTDWNLALNPEGGPNWVRNFVDSPIIVDITKDTFYKQPMFYHLGHFSKFIPEGSQRVGLVASQKNDLDAVALLHPDGSAVVVVLNRSSKDVPLTIKDPAVGFLETISPGYSIHTYLWRRQ

SEQ ID NO: 483 - DNA, 1614 bp, synthetic construct
  misc_feature 1..1614: note = Variant of B-Glucocerebrosidase
  source 1..1614: mol_type = other DNA
atggagttttcttctcctagtagagaagaatgccccaagccactgagcagggtgagcatcatggctggatccctcacagggctgcttcttttgcaggcagtctcatgggcctctggagccaggccctgtattcccaagtcattcggctactcctcagtggtgtgtgtatgcaatgccacctattgtgacagtttcgatcctccaactctccctgctctgggtaccttctcccggtatgagagcacaagaagtggaagacgcatggagctctcaatgggccctatacaggctaaccacactgggacaggtctgctgctgaccctccaacctgaacagaagtttcagaaagtcaagggatttggaggagccatgactgatgcagcagcactcaacatcttggccctgtctccaccagcccagaatctgctgttgaagtcctacttctcagaggaggggattggctacaacatcatccgggttcccatggctagctgtgacttctccattaggacctatacatacgctgacacccccgatgattttcagctccataatttcagtctccctgaagaagacaccaaactgaagatacctctgattcacagagccttgcaactgtcccaaaggccagtgagcctcttcgcttctccctggactagtcctacatggctgaagactaatggtgctgttaatgggaaaggctccctgaaaggacagccaggtgacatatatcatcagacatgggcccgctactttgtgaaattccttgatgcctatgcagagcacaagctccaattctgggcagtcaccgcagaaaacgagccctcagctgggctgctgtctggctacccctttcagtgcttgggctttactcctgagcatcaacgggacttcattgcccgggatttggggccaacactggccaacagcacccaccacaatgtaagactcctcatgctggatgaccagaggctgctgctccctcattgggccaaggtggtgttgacagacccagaagctgccaaatatgttcatggcatcgctgtccactggtacctggattttttggcccctgcaaaggctactctgggagagacccacagactcttccccaataccatgctgtttgcatcagaagcctgcgtggggagcaaattctgggagcagtctgttaggctgggttcctgggatcggggcatgcaatattcccatagtataataactaacctcctctaccacgtggtaggatggacagactggaatctggctttgaacccagaaggaggccccaattgggtgcgcaactttgttgacagccccatcattgtggatatcacaaaggacaccttctacaaacagcctatgttctatcatctggggcactttagcaagttcattccagagggttcccagagagtaggcttggttgcctcacagaagaatgatctggatgctgtggcactcctgcatcctgacgggagtgcagtggtggtagtactgaacaggtctagcaaagatgttcccttgactatcaaagacccagctgtgggctttctggaaaccatttcccctggatactctatcatgacctatctctggagaagacagtaatga

SEQ ID NO: 484 - protein, 536 aa, synthetic construct
  REGION 1..536: note = Variant of B-Glucocerebrosidase
MEFSSPSREECPKPLSRVSIMAGSLTGLLLLQAVSWASGARPCIPKSFGYSSVVCVCNATYCDSFDPPTLPALGTFSRYESTRSGRRMELSMGPIQANHTGTGLLLTLQPEQKFQKVKGFGGAMTDAAALNILALSPPAQNLLLKSYFSEEGIGYNIIRVPMASCDFSIRTYTYADTPDDFQLHNFSLPEEDTKLKIPLIHRALQLSQRPVSLFASPWTSPTWLKTNGAVNGKGSLKGQPGDIYHQTWARYFVKFLDAYAEHKLQFWAVTAENEPSAGLLSGYPFQCLGFTPEHQRDFIARDLGPTLANSTHHNVRLLMLDDQRLLLPHWAKVVLTDPEAAKYVHGIAVHWYLDFLAPAKATLGETHRLFPNTMLFASEACVGSKFWEQSVRLGSWDRGMQYSHSIITNLLYHVVGWTDWNLALNPEGGPNWVRNFVDSPIIVDITKDTFYKQPMFYHLGHFSKFIPEGSQRVGLVASQKNDLDAVALLHPDGSAVVVVLNRSSKDVPLTIKDPAVGFLETISPGYSIMTYLWRRQ

SEQ ID NO: 485 - DNA, 1614 bp, synthetic construct
  misc_feature 1..1614: note = Variant of B-Glucocerebrosidase
  source 1..1614: mol_type = other DNA
atggagttttcttctcctagtagagaagaatgccccaagccactgagcagggtgagcatcatggctggatccctcacagggctgcttcttttgcaggcagtctcatgggcctctggagccaggccctgtattcccaagtcattcggctactcctcagtggtgtgtgtatgcaatgccacctattgtgacagtttcgatcctccaactctccgggctctgggtaccttctcccggtatgagagcacaagaagtggaagacgcatggagctctcaatgggccctatacaggctaaccacactgggacaggtctgctgctgaccctccaacctgaacagaagtttcagaaagtcaagggatttggaggagccatgactgatgcagcagcactcaacatcttggccctgtctccaccagcccagaatctgctgttgaagtcctacttctcagaggaggggattggctacaacatcatccgggttcccatggctagctgtgacttctccattaggacctatacatacgctgacacccccgatgattttcagctccataatttcagtctccctgaagaagacaccaaactgaagatacctctgattcacagagccttgcaactgtcccaaaggccagtgagcctcttcgcttctccctggactagtcctacatggctgaagactaatggtgctgttaatgggaaaggctccctgaaaggacagccaggtgacatatatcatcagacatgggcccgctactttgtgaaattccttgatgcctatgcagagcacaagctccaattctgggcagtcaccgcagaaaacgagccctcagctgggctgctgtctggctacccctttcagtgcttgggctttactcctgagcatcaacgggacttcattgcccgggatttggggccaacactggccaacagcacccaccacaatgtaagactcctcatgctggatgaccagaggctgctgctccctcattgggccaaggtggtgttgacagacccagaagctgccaaatatgttcatggcatcgctgtccactggtacctggattttttggcccctgcaaaggctactctgggagagacccacagactcttccccaataccatgctgtttgcatcagaagcctgcgtggggagcaaattctgggagcagtctgttaggctgggttcctgggatcggggcatgcaatattcccatagtataataactaacctcctctaccacgtggtaggatggacagactggaatctggctttgaacccagaaggaggccccaattgggtgcgcaactttgttgacagccccatcattgtggatatcacaaaggacaccttctacaaacagcctatgttctatcatctggggcactttagcaagttcattccagagggttcccagagagtaggcttggttgcctcacagaagaatgatctggatgctgtggcactcctgcatcctgacgggagtgcagtggtggtagtactgaacaggtctagcaaagatgttcccttgactatcaaagacccagctgtgggctttctggaaaccatttcccctggatactctatccacacctatctctggagaagacagtaatga

SEQ ID NO: 486 - protein, 536 aa, synthetic construct
  REGION 1..536: note = Variant of B-Glucocerebrosidase
MEFSSPSREECPKPLSRVSIMAGSLTGLLLLQAVSWASGARPCIPKSFGYSSVVCVCNATYCDSFDPPTLRALGTFSRYESTRSGRRMELSMGPIQANHTGTGLLLTLQPEQKFQKVKGFGGAMTDAAALNILALSPPAQNLLLKSYFSEEGIGYNIIRVPMASCDFSIRTYTYADTPDDFQLHNFSLPEEDTKLKIPLIHRALQLSQRPVSLFASPWTSPTWLKTNGAVNGKGSLKGQPGDIYHQTWARYFVKFLDAYAEHKLQFWAVTAENEPSAGLLSGYPFQCLGFTPEHQRDFIARDLGPTLANSTHHNVRLLMLDDQRLLLPHWAKVVLTDPEAAKYVHGIAVHWYLDFLAPAKATLGETHRLFPNTMLFASEACVGSKFWEQSVRLGSWDRGMQYSHSIITNLLYHVVGWTDWNLALNPEGGPNWVRNFVDSPIIVDITKDTFYKQPMFYHLGHFSKFIPEGSQRVGLVASQKNDLDAVALLHPDGSAVVVVLNRSSKDVPLTIKDPAVGFLETISPGYSIHTYLWRRQ

SEQ ID NO: 487 - DNA, 1614 bp, synthetic construct
  misc_feature 1..1614: note = Variant of B-Glucocerebrosidase
  source 1..1614: mol_type = other DNA
atggagttttcttctcctagtagagaagaatgccccaagccactgagcagggtgagcatcatggctggatccctcacagggctgcttcttttgcaggcagtctcatgggcctctggagccaggccctgtattcccaagtcattcggctactcctcagtggtgtgtgtatgcaatgccacctattgtgacagtttcgatcctccaactctccctgctctgggtaccttctcccggtatgagagcacaagaagtggaagacgcatggagctctcaatgggccctatacaggctaaccacactgggacaggtctgctgctgaccctccaacctgaacagaagtttcagaaagtcaagggatttggaggagccatgactgatgcagcagcactcaacatcttggccctgtctccaccagcccagaatctgctgttgaagtcctacttctcagaggaggggattggctacaacatcatccgggttcccatggctagctgtgacttctccattaggacctatacatacgctgacacccccgatgattttcagctccataatttcagtctccctgaagaagacaccaaactgaagatacctctgattcacagagccttgcaactgtcccaaaggccagtgagcctcttcgcttctccctggactagtcctacatggctgaagactaatggtgctgttaatgggaaaggctccctgaaaggacagccaggtgacatatatcatcagacatgggcccgctactttgtgaaattccttgatgcctatgcagagcacaagctccaattctgggcagtcaccgcagaaaacgagccctcagctgggctgctgtctggctacccctttcagtgcttgggctttactcctgagcatcaacgggacttcattgcccgggatttggggccaacactggccaacagcacccaccacaatgtaagactcctcatgctggatgaccagaggctgctgctccctcattgggccaaggtggtgttgacagacccagaagctgccaaatatgttcatggcatcgctgtccactggtacctggattttttggcccctgcaaaggctactctgggagagacccacagactcttccccaataccatgctgtttgcatcagaagcctgcgtggggagcaaattctgggagcagtctgttaggctgggttcctgggatcggggcatgcaatattcccatagtataataactaacctcctctaccacgtggtaggatggacagactggaatctggctttgaacccagaaggaggccccaattgggtgcgcaactttgttgacagccccatcattgtggatatcacaaaggacaccttctacaaacagcctatgttctatcatctggggcactttagcaagttcattccagagggttcccagagactgggcttggttgcctcacagaagaatgatctggatgctgtggcactcctgcatcctgacgggagtgcagtggtggtagtactgaacaggtctagcaaagatgttcccttgactatcaaagacccagctgtgggctttctggaaaccatttcccctggatactctatccacacctatctctggagaagacagtaatga

SEQ ID NO: 488 - protein, 536 aa, synthetic construct
  REGION 1..536: note = Variant of B-Glucocerebrosidase
MEFSSPSREECPKPLSRVSIMAGSLTGLLLLQAVSWASGARPCIPKSFGYSSVVCVCNATYCDSFDPPTLPALGTFSRYESTRSGRRMELSMGPIQANHTGTGLLLTLQPEQKFQKVKGFGGAMTDAAALNILALSPPAQNLLLKSYFSEEGIGYNIIRVPMASCDFSIRTYTYADTPDDFQLHNFSLPEEDTKLKIPLIHRALQLSQRPVSLFASPWTSPTWLKTNGAVNGKGSLKGQPGDIYHQTWARYFVKFLDAYAEHKLQFWAVTAENEPSAGLLSGYPFQCLGFTPEHQRDFIARDLGPTLANSTHHNVRLLMLDDQRLLLPHWAKVVLTDPEAAKYVHGIAVHWYLDFLAPAKATLGETHRLFPNTMLFASEACVGSKFWEQSVRLGSWDRGMQYSHSIITNLLYHVVGWTDWNLALNPEGGPNWVRNFVDSPIIVDITKDTFYKQPMFYHLGHFSKFIPEGSQRLGLVASQKNDLDAVALLHPDGSAVVVVLNRSSKDVPLTIKDPAVGFLETISPGYSIHTYLWRRQ

SEQ ID NO: 489 - DNA, 1614 bp, synthetic construct
  misc_feature 1..1614: note = Variant of B-Glucocerebrosidase
  source 1..1614: mol_type = other DNA
atggagttttcttctcctagtagagaagaatgccccaagccactgagcagggtgagcatcatggctggatccctcacagggctgcttcttttgcaggcagtctcatgggcctctggagccaggccctgtattcccaagtcattcggctactcctcagtggtgtgtgtatgcaatgccacctattgtgacagtttcgatcctccaactctccctgctctgggtaccttctcccggtatgagagcacaagaagtggaagacgcatggagctctcaatgggccctacgcaggctaaccacactgggacaggtctgctgctgaccctccaacctgaacagaagtttcagaaagtcaagggatttggaggagccatgactgatgcagcagcactcaacatcttggccctgtctccaccagcccagaatctgctgttgaagtcctacttctcagaggaggggattggctacaacatcatccgggttcccatggctagctgtgacttctccattaggacctatacatacgctgacacccccgatgattttcagctccataatttcagtctccctgaagaagacaccaaactgaagatacctctgattcacagagccttgcaactgtcccaaaggccagtgagcctcttcgcttctccctggactagtcctacatggctgaagactaatggtgctgttaatgggaaaggctccctgaaaggacagccaggtgacatatatcatcagacatgggcccgctactttgtgaaattccttgatgcctatgcagagcacaagctccaattctgggcagtcaccgcagaaaacgagccctcagctgggctgctgtctggctacccctttcagtgcttgggctttactcctgagcatcaacgggacttcattgcccgggatttggggccaacactggccaacagcacccaccacaatgtaagactcctcatgctggatgaccagaggctgctgctccctcattgggccaaggtggtgttgacagacccagaagctgccaaatatgttcatggcatcgctgtccactggtacctggattttttggcccctgcaaaggctactctgggagagacccacagactcttccccaataccatgctgtttgcatcagaagcctgcgtggggagcaaattctgggagcagtctgttaggctgggttcctgggatcggggcatgcaatattcccatagtataataactaacctcctctaccacgtggtaggatggacagactggaatctggctttgaacccagaaggaggccccaattgggtgcgcaactttgttgacagccccatcattgtggatatcacaaaggacaccttctacaaacagcctatgttctatcatctggggcactttagcaagttcattccagagggttcccagagagtaggcttggttgcctcacagaagaatgatctggatgctgtggcactcctgcatcctgacgggagtgcagtggtggtagtactgaacaggtctagcaaagatgttcccttgactatcaaagacccagctgtgggctttctggaaaccatttcccctggatactctatccacacctatctctggagaagacagtaatga

SEQ ID NO: 490 - protein, 536 aa, synthetic construct
  REGION 1..536: note = Variant of B-Glucocerebrosidase
MEFSSPSREECPKPLSRVSIMAGSLTGLLLLQAVSWASGARPCIPKSFGYSSVVCVCNATYCDSFDPPTLPALGTFSRYESTRSGRRMELSMGPTQANHTGTGLLLTLQPEQKFQKVKGFGGAMTDAAALNILALSPPAQNLLLKSYFSEEGIGYNIIRVPMASCDFSIRTYTYADTPDDFQLHNFSLPEEDTKLKIPLIHRALQLSQRPVSLFASPWTSPTWLKTNGAVNGKGSLKGQPGDIYHQTWARYFVKFLDAYAEHKLQFWAVTAENEPSAGLLSGYPFQCLGFTPEHQRDFIARDLGPTLANSTHHNVRLLMLDDQRLLLPHWAKVVLTDPEAAKYVHGIAVHWYLDFLAPAKATLGETHRLFPNTMLFASEACVGSKFWEQSVRLGSWDRGMQYSHSIITNLLYHVVGWTDWNLALNPEGGPNWVRNFVDSPIIVDITKDTFYKQPMFYHLGHFSKFIPEGSQRVGLVASQKNDLDAVALLHPDGSAVVVVLNRSSKDVPLTIKDPAVGFLETISPGYSIHTYLWRRQ

SEQ ID NO: 491 - DNA, 1614 bp, synthetic construct
  misc_feature 1..1614: note = Variant of B-Glucocerebrosidase
  source 1..1614: mol_type = other DNA
atggagttttcttctcctagtagagaagaatgccccaagccactgagcagggtgagcatcatggctggatccctcacagggctgcttcttttgcaggcagtctcatgggcctctggagccaggccctgtattcccaagtcattcggctactcctcagtggtgtgtgtatgcaatgccacctattgtgacagtttcgatcctccaactctccctgctctgggtaccttctcccggtatgagagcacaagaagtggaagacgcatggagctctcaatgggccctatacaggctaaccacactgggacaggtctgctgctggcgctccaacctgaacagaagtttcagaaagtcaagggatttggaggagccatgactgatgcagcagcactcaacatcttggccctgtctccaccagcccagaatctgctgttgaagtcctacttctcagaggaggggattggctacaacatcatccgggttcccatggctagctgtgacttctccattaggacctatacatacgctgacacccccgatgattttcagctccataatttcagtctccctgaagaagacaccaaactgaagatacctctgattcacagagccttgcaactgtcccaaaggccagtgagcctcttcgcttctccctggactagtcctacatggctgaagactaatggtgctgttaatgggaaaggctccctgaaaggacagccaggtgacatatatcatcagacatgggcccgctactttgtgaaattccttgatgcctatgcagagcacaagctccaattctgggcagtcaccgcagaaaacgagccctcagctgggctgctgtctggctacccctttcagtgcttgggctttactcctgagcatcaacgggacttcattgcccgggatttggggccaacactggccaacagcacccaccacaatgtaagactcctcatgctggatgaccagaggctgctgctccctcattgggccaaggtggtgttgacagacccagaagctgccaaatatgttcatggcatcgctgtccactggtacctggattttttggcccctgcaaaggctactctgggagagacccacagactcttccccaataccatgctgtttgcatcagaagcctgcgtggggagcaaattctgggagcagtctgttaggctgggttcctgggatcggggcatgcaatattcccatagtataataactaacctcctctaccacgtggtaggatggacagactggaatctggctttgaacccagaaggaggccccaattgggtgcgcaactttgttgacagccccatcattgtggatatcacaaaggacaccttctacaaacagcctatgttctatcatctggggcactttagcaagttcattccagagggttcccagagagtaggcttggttgcctcacagaagaatgatctggatgctgtggcactcctgcatcctgacgggagtgcagtggtggtagtactgaacaggtctagcaaagatgttcccttgactatcaaagacccagctgtgggctttctggaaaccatttcccctggatactctatccacacctatctctggagaagacagtaatga

SEQ ID NO: 492 - protein, 536 aa, synthetic construct
  REGION 1..536: note = Variant of B-Glucocerebrosidase
MEFSSPSREECPKPLSRVSIMAGSLTGLLLLQAVSWASGARPCIPKSFGYSSVVCVCNATYCDSFDPPTLPALGTFSRYESTRSGRRMELSMGPIQANHTGTGLLLALQPEQKFQKVKGFGGAMTDAAALNILALSPPAQNLLLKSYFSEEGIGYNIIRVPMASCDFSIRTYTYADTPDDFQLHNFSLPEEDTKLKIPLIHRALQLSQRPVSLFASPWTSPTWLKTNGAVNGKGSLKGQPGDIYHQTWARYFVKFLDAYAEHKLQFWAVTAENEPSAGLLSGYPFQCLGFTPEHQRDFIARDLGPTLANSTHHNVRLLMLDDQRLLLPHWAKVVLTDPEAAKYVHGIAVHWYLDFLAPAKATLGETHRLFPNTMLFASEACVGSKFWEQSVRLGSWDRGMQYSHSIITNLLYHVVGWTDWNLALNPEGGPNWVRNFVDSPIIVDITKDTFYKQPMFYHLGHFSKFIPEGSQRVGLVASQKNDLDAVALLHPDGSAVVVVLNRSSKDVPLTIKDPAVGFLETISPGYSIHTYLWRRQ

SEQ ID NO: 493 - DNA, 1614 bp, synthetic construct
  misc_feature 1..1614: note = Variant of B-Glucocerebrosidase
  source 1..1614: mol_type = other DNA
atggagttttcttctcctagtagagaagaatgccccaagccactgagcagggtgagcatcatggctggatccctcacagggctgcttcttttgcaggcagtctcatgggcctctggagccaggccctgtattcccaagtcattcggctactcctcagtggtgtgtgtatgcaatgccacctattgtgacagtttcgatcctccaactctccctgctctgggtaccttctcccggtatgagagcacaagaagtggaagacgcatggagctctcaatgggccctatacaggctaaccacactgggacaggtctgctgctgaccctccaacctgaacagaagtttcagaaagtcaagggatttggaggagccatgactgatgcagcagcactcaacatcttggccctgtctccaccagcccagaatctgctgttgaagtcctacttctcagaggaggggattggctacaacatcatccgggttcccatggctagctgtgacttctccattaggacctatacatacgctgacacccccgatgattttcagctccataatttcagtctccctgaagaagacaccaaactgaagatacctctgattcacagagccttgcaactgtcccaaaggccagtgagcctcttcgcttctccctggactagtcctacatggctgaagactaatggtgctgttaatgggaaaggctccctgaaaggacagccaggtgacatatatcatcagacatgggcccgctactttgtgaaattccttgatgcctatgcagagcacaagctccaattctgggcagtcaccgcagaaaacgagccctcagctgggctgctgtctggctacccctttcagtgcttgggctttactcctgagcatcaacgggacttcattgcccgggatttggggccaacactggccaacagcacccaccacaatgtaagactcctcatgctggatgaccagaggctgctgctccctcattgggccaaggtggtgttgacagacccagaagctgccaaatatgttcatggcatcgctgtccactggtacctggattttttggcccctgcaaaggctactctgggagagacccacagactcttccccaataccatgctgtttgcatcagaagcctgcgtggggagcaaattctgggagcagtctgttaggctgggttcctgggatcggggcatgcaatattcccatagtataataactaacctcctctaccacgtggtaggatggacagactggaatctggctttgaacccagaaggaggccccaattgggtgcgcaactttgttgacagccccatcattgtggatatcacaaaggacaccttctacaaacagcctatgttctatcatctggggcactttagcaagttcattccagagggttcccagagagtaggcttggttgcctcacagaagaatgatctggatgctgtggcactcctgcatcctgacgggagtgcagtggtggtagtactgaacaggtctagcaaagatgttcccttgactatcaaagacccagctgtgggctttctggtgaccatttcccctggatactctatccacacctatctctggagaagacagtaatga

SEQ ID NO: 494 - protein, 536 aa, synthetic construct
  REGION 1..536: note = Variant of B-Glucocerebrosidase
MEFSSPSREECPKPLSRVSIMAGSLTGLLLLQAVSWASGARPCIPKSFGYSSVVCVCNATYCDSFDPPTLPALGTFSRYESTRSGRRMELSMGPIQANHTGTGLLLTLQPEQKFQKVKGFGGAMTDAAALNILALSPPAQNLLLKSYFSEEGIGYNIIRVPMASCDFSIRTYTYADTPDDFQLHNFSLPEEDTKLKIPLIHRALQLSQRPVSLFASPWTSPTWLKTNGAVNGKGSLKGQPGDIYHQTWARYFVKFLDAYAEHKLQFWAVTAENEPSAGLLSGYPFQCLGFTPEHQRDFIARDLGPTLANSTHHNVRLLMLDDQRLLLPHWAKVVLTDPEAAKYVHGIAVHWYLDFLAPAKATLGETHRLFPNTMLFASEACVGSKFWEQSVRLGSWDRGMQYSHSIITNLLYHVVGWTDWNLALNPEGGPNWVRNFVDSPIIVDITKDTFYKQPMFYHLGHFSKFIPEGSQRVGLVASQKNDLDAVALLHPDGSAVVVVLNRSSKDVPLTIKDPAVGFLVTISPGYSIHTYLWRRQ

SEQ ID NO: 495 - DNA, 1614 bp, synthetic construct
  misc_feature 1..1614: note = Variant of B-Glucocerebrosidase
  source 1..1614: mol_type = other DNA
atggagttttcttctcctagtagagaagaatgccccaagccactgagcagggtgagcatcatggctggatccctcacagggctgcttcttttgcaggcagtctcatgggcctctggagccaggccctgtattcccaagtcattcggctactcctcagtggtgtgtgtatgcaatgccacctattgtgacagtttcgatcctccaactctccctgctctgggtaccttctcccggtatgagagcacaagaagtggaagacgcatggagctctcaatgggccctatacaggctaaccacactttgacaggtctgctgctgaccctccaacctgaacagaagtttcagaaagtcaagggatttggaggagccatgactgatgcagcagcactcaacatcttggccctgtctccaccagcccagaatctgctgttgaagtcctacttctcagaggaggggattggctacaacatcatccgggttcccatggctagctgtgacttctccattaggacctatacatacgctgacacccccgatgattttcagctccataatttcagtctccctgaagaagacaccaaactgaagatacctctgattcacagagccttgcaactgtcccaaaggccagtgagcctcttcgcttctccctggactagtcctacatggctgaagactaatggtgctgttaatgggaaaggctccctgaaaggacagccaggtgacatatatcatcagacatgggcccgctactttgtgaaattccttgatgcctatgcagagcacaagctccaattctgggcagtcaccgcagaaaacgagccctcagctgggctgctgtctggctacccctttcagtgcttgggctttactcctgagcatcaacgggacttcattgcccgggatttggggccaacactggccaacagcacccaccacaatgtaagactcctcatgctggatgaccagaggctgctgctccctcattgggccaaggtggtgttgacagacccagaagctgccaaatatgttcatggcatcgctgtccactggtacctggattttttggcccctgcaaaggctactctgggagagacccacagactcttccccaataccatgctgtttgcatcagaagcctgcgtggggagcaaattctgggagcagtctgttaggctgggttcctgggatcggggcatgcaatattcccatagtataataactaacctcctctaccacgtggtaggatggacagactggaatctggctttgaacccagaaggaggccccaattgggtgcgcaactttgttgacagccccatcattgtggatatcacaaaggacaccttctacaaacagcctatgttctatcatctggggcactttagcaagttcattccagagggttcccagagagtaggcttggttgcctcacagaagaatgatctggatgctgtggcactcctgcatcctgacgggagtgcagtggtggtagtactgaacaggtctagcaaagatgttcccttgactatcaaagacccagctgtgggctttctggaaaccatttcccctggatactctatccacacctatctctggagaagacagtaatga

SEQ ID NO: 496 - protein, 536 aa, synthetic construct
  REGION 1..536: note = Variant of B-Glucocerebrosidase
MEFSSPSREECPKPLSRVSIMAGSLTGLLLLQAVSWASGARPCIPKSFGYSSVVCVCNATYCDSFDPPTLPALGTFSRYESTRSGRRMELSMGPIQANHTLTGLLLTLQPEQKFQKVKGFGGAMTDAAALNILALSPPAQNLLLKSYFSEEGIGYNIIRVPMASCDFSIRTYTYADTPDDFQLHNFSLPEEDTKLKIPLIHRALQLSQRPVSLFASPWTSPTWLKTNGAVNGKGSLKGQPGDIYHQTWARYFVKFLDAYAEHKLQFWAVTAENEPSAGLLSGYPFQCLGFTPEHQRDFIARDLGPTLANSTHHNVRLLMLDDQRLLLPHWAKVVLTDPEAAKYVHGIAVHWYLDFLAPAKATLGETHRLFPNTMLFASEACVGSKFWEQSVRLGSWDRGMQYSHSIITNLLYHVVGWTDWNLALNPEGGPNWVRNFVDSPIIVDITKDTFYKQPMFYHLGHFSKFIPEGSQRVGLVASQKNDLDAVALLHPDGSAVVVVLNRSSKDVPLTIKDPAVGFLETISPGYSIHTYLWRRQ

SEQ ID NO: 497 - DNA, 1614 bp, synthetic construct
  misc_feature 1..1614: note = Variant of B-Glucocerebrosidase
  source 1..1614: mol_type = other DNA
atggagttttcttctcctagtagagaagaatgccccaagccactgagcagggtgagcatcatggctggatccctcacagggctgcttcttttgcaggcagtctcatgggcctctggagccaggccctgtattcccaagtcattcggctactcctcagtggtgtgtgtatgcaatgccacctattgtgacagtttcgatcctccaactctccctgctctgggtaccttctcccggtatgagagcacaagaagtggaagacgcatggagctctcaatgggccctatacaggctaaccacactgggacaggtctgctgctgaccctccaacctgaacagaagtttcagaaagtcaagggatttggaggagccatgactgatgcagcagcactcaacatcttggccctgtctccaccagcccagaatctgctgttgaagtcctacttctcagaggaggggattggctacaacatcatccgggttcccatggctagctgtgacttctccattaggacctatacatacgctgacacccccgatgattttcagctccataatttcagtctccctgaagaagacaccaaactgaagatacctctgattcacagagccttgcaactgtcccaaaggccagtgagcctcttcgcttctccctggactagtcctacatggctgaagactaatggtgctgttaatgggaaaggctccctgaaaggacagccaggtgacatatatcatcagacatgggcccgctactttgtgaaattccttgatgcctatgcagagcacaagctccaattctgggcagtcaccgcagaaaacgagccctcagctgggctgctgtctggctacccctttcagtgcttgggctttactcctgagcatcaacgggacttcattgcccgggatttggggccaacactggccaacagcacccaccacaatgtaagactcctcatgctggatgaccagaggctgctgctccctcattgggccaaggtggtgttgacagacccagaagctgccaaatatgttcatggcatcgctgtccactggtacctggattttttggcccctgcaaaggctactctgggagagacccacagactcttccccaataccatgctgtttgcatcagaagcctgcgtggggagcaaattctgggagcagtctgttaggctgggttcctgggatcggggcatgcaatattcccatagtataataactaacctcctctaccacgtggtaggatggacagactggaatctggctttgaacccagaaggaggccccaattgggtgcgcaactttgttgacagccccatcattgtggatatcacaaaggacaccttctacaaacagcctatgttctatcatctggggcactttagcaagttcattccagagggttcccagagagtaggcttggttgcctcacagaagaatgatctggatgctgtggcactcctgcatcctgacgggagtgcagtggtggtagtactgaacaggtctagcaaagatgttcccttgactatcaaagacccagctgtgggctttctgagtaccatttcccctggatactctatccacacctatctctggagaagacagtaatga

SEQ ID NO: 498 - protein, 536 aa, synthetic construct
  REGION 1..536: note = Variant of B-Glucocerebrosidase
MEFSSPSREECPKPLSRVSIMAGSLTGLLLLQAVSWASGARPCIPKSFGYSSVVCVCNATYCDSFDPPTLPALGTFSRYESTRSGRRMELSMGPIQANHTGTGLLLTLQPEQKFQKVKGFGGAMTDAAALNILALSPPAQNLLLKSYFSEEGIGYNIIRVPMASCDFSIRTYTYADTPDDFQLHNFSLPEEDTKLKIPLIHRALQLSQRPVSLFASPWTSPTWLKTNGAVNGKGSLKGQPGDIYHQTWARYFVKFLDAYAEHKLQFWAVTAENEPSAGLLSGYPFQCLGFTPEHQRDFIARDLGPTLANSTHHNVRLLMLDDQRLLLPHWAKVVLTDPEAAKYVHGIAVHWYLDFLAPAKATLGETHRLFPNTMLFASEACVGSKFWEQSVRLGSWDRGMQYSHSIITNLLYHVVGWTDWNLALNPEGGPNWVRNFVDSPIIVDITKDTFYKQPMFYHLGHFSKFIPEGSQRVGLVASQKNDLDAVALLHPDGSAVVVVLNRSSKDVPLTIKDPAVGFLSTISPGYSIHTYLWRRQ

SEQ ID NO: 499 - DNA, 1614 bp, synthetic construct
  misc_feature 1..1614: note = Variant of B-Glucocerebrosidase
  source 1..1614: mol_type = other DNA
atggagttttcttctcctagtagagaagaatgccccaagccactgagcagggtgagcatcatggctggatccctcacagggctgcttcttttgcaggcagtctcatgggcctctggagccaggccctgtattcccaagtcattcggctactcctcagtggtgtgtgtatgcaatgccacctattgtgacagtttcgatcctccaactctccatgctctgggtaccttctcccggtatgagagcacaagaagtggaagacgcatggagctctcaatgggccctatacaggctaaccacactgggacaggtctgctgctgaccctccaacctgaacagaagtttcagaaagtcaagggatttggaggagccatgactgatgcagcagcactcaacatcttggccctgtctccaccagcccagaatctgctgttgaagtcctacttctcagaggaggggattggctacaacatcatccgggttcccatggctagctgtgacttctccattaggacctatacatacgctgacacccccgatgattttcagctccataatttcagtctccctgaagaagacaccaaactgaagatacctctgattcacagagccttgcaactgtcccaaaggccagtgagcctcttcgcttctccctggactagtcctacatggctgaagactaatggtgctgttaatgggaaaggctccctgaaaggacagccaggtgacatatatcatcagacatgggcccgctactttgtgaaattccttgatgcctatgcagagcacaagctccaattctgggcagtcaccgcagaaaacgagccctcagctgggctgctgtctggctacccctttcagtgcttgggctttactcctgagcatcaacgggacttcattgcccgggatttggggccaacactggccaacagcacccaccacaatgtaagactcctcatgctggatgaccagaggctgctgctccctcattgggccaaggtggtgttgacagacccagaagctgccaaatatgttcatggcatcgctgtccactggtacctggattttttggcccctgcaaaggctactctgggagagacccacagactcttccccaataccatgctgtttgcatcagaagcctgcgtggggagcaaattctgggagcagtctgttaggctgggttcctgggatcggggcatgcaatattcccatagtataataactaacctcctctaccacgtggtaggatggacagactggaatctggctttgaacccagaaggaggccccaattgggtgcgcaactttgttgacagccccatcattgtggatatcacaaaggacaccttctacaaacagcctatgttctatcatctggggcactttagcaagttcattccagagggttcccagagagtaggcttggttgcctcacagaagaatgatctggatgctgtggcactcctgcatcctgacgggagtgcagtggtggtagtactgaacaggtctagcaaagatgttcccttgactatcaaagacccagctgtgggctttctggaaaccatttcccctggatactctatccacacctatctctggagaagacagtaatga

SEQ ID NO: 500 - protein, 536 aa, synthetic construct
  REGION 1..536: note = Variant of B-Glucocerebrosidase
MEFSSPSREECPKPLSRVSIMAGSLTGLLLLQAVSWASGARPCIPKSFGYSSVVCVCNATYCDSFDPPTLHALGTFSRYESTRSGRRMELSMGPIQANHTGTGLLLTLQPEQKFQKVKGFGGAMTDAAALNILALSPPAQNLLLKSYFSEEGIGYNIIRVPMASCDFSIRTYTYADTPDDFQLHNFSLPEEDTKLKIPLIHRALQLSQRPVSLFASPWTSPTWLKTNGAVNGKGSLKGQPGDIYHQTWARYFVKFLDAYAEHKLQFWAVTAENEPSAGLLSGYPFQCLGFTPEHQRDFIARDLGPTLANSTHHNVRLLMLDDQRLLLPHWAKVVLTDPEAAKYVHGIAVHWYLDFLAPAKATLGETHRLFPNTMLFASEACVGSKFWEQSVRLGSWDRGMQYSHSIITNLLYHVVGWTDWNLALNPEGGPNWVRNFVDSPIIVDITKDTFYKQPMFYHLGHFSKFIPEGSQRVGLVASQKNDLDAVALLHPDGSAVVVVLNRSSKDVPLTIKDPAVGFLETISPGYSIHTYLWRRQ

SEQ ID NO: 501 - DNA, 1614 bp, synthetic construct
  misc_feature 1..1614: note = Variant of B-Glucocerebrosidase
  source 1..1614: mol_type = other DNA
atggagttttcttctcctagtagagaagaatgccccaagccactgagcagggtgagcatcatggctggatccctcacagggctgcttcttttgcaggcagtctcatgggcctctggagccaggccctgtattcccaagtcattcggctactcctcagtggtgtgtgtatgcaatgccacctattgtgacagtttcgatcctccaactctccctgctctgggtaccttctcccggtatgagagcacaagaagtggaagacgcatggatctctcaatgggccctatacaggctaaccacactgggacaggtctgctgctgaccctccaacctgaacagaagtttcagaaagtcaagggatttggaggagccatgactgatgcagcagcactcaacatcttggccctgtctccaccagcccagaatctgctgttgaagtcctacttctcagaggaggggattggctacaacatcatccgggttcccatggctagctgtgacttctccattaggacctatacatacgctgacacccccgatgattttcagctccataatttcagtctccctgaagaagacaccaaactgaagatacctctgattcacagagccttgcaactgtcacaaaggccagtgagcctcttcgcttctccctggactagtcctacatggctgaagactaatggtgctgttaatgggaaaggctccctgaaaggacagccaggtgacatatatcatcagacatgggcccgctactttgtgaaattccttgatgcctatgcagagcacaagctccaattctgggcagtcaccgcagaaaacgagccctcagctgggctgctgtctggctacccctttcagtgcttgggctttactcctgagcatcaacgggacttcattgcccgggatttggggccaacactggccaacagcacccaccacaatgtaagactcctcatgctggatgaccagaggctgctgctccctcattgggccaaggtggtgttgacagacccagaagctgccaaatatgttcatggcatcgctgtccactggtacctggattttttggcccctgcaaaggctactctgggagagacccacagactcttccccaataccatgctgtttgcatcagaagcctgcgtggggagcaaattctgggagcagtctgttaggctgggttcctgggatcggggcatgcaatattcccatagtataataactaacctcctctaccacgtggtaggatggacagactggaatctggctttgaacccagaaggaggccccaattgggtgcgcaactttgttgacagccccatcattgtggatatcacaaaggacaccttctacaaacagcctatgttctatcatctggggcactttagcaagttcattccagagggttcccagagagtaggcttggttgcctcacagaagaatgatctggatgctgtggcactcctgcatcctgacgggagtgcagtggtggtagtactgaacaggtctagcaaagatgttcccttgactatcaaagacccagctgtgggctttctggaaaccatttcccctggatactctatccacacctatctctggagaagacagtaatga

SEQ ID NO: 502 - protein, 536 aa, synthetic construct
  REGION 1..536: note = Variant of B-Glucocerebrosidase
MEFSSPSREECPKPLSRVSIMAGSLTGLLLLQAVSWASGARPCIPKSFGYSSVVCVCNATYCDSFDPPTLPALGTFSRYESTRSGRRMDLSMGPIQANHTGTGLLLTLQPEQKFQKVKGFGGAMTDAAALNILALSPPAQNLLLKSYFSEEGIGYNIIRVPMASCDFSIRTYTYADTPDDFQLHNFSLPEEDTKLKIPLIHRALQLSQRPVSLFASPWTSPTWLKTNGAVNGKGSLKGQPGDIYHQTWARYFVKFLDAYAEHKLQFWAVTAENEPSAGLLSGYPFQCLGFTPEHQRDFIARDLGPTLANSTHHNVRLLMLDDQRLLLPHWAKVVLTDPEAAKYVHGIAVHWYLDFLAPAKATLGETHRLFPNTMLFASEACVGSKFWEQSVRLGSWDRGMQYSHSIITNLLYHVVGWTDWNLALNPEGGPNWVRNFVDSPIIVDITKDTFYKQPMFYHLGHFSKFIPEGSQRVGLVASQKNDLDAVALLHPDGSAVVVVLNRSSKDVPLTIKDPAVGFLETISPGYSIHTYLWRRQ

SEQ ID NO: 503 - DNA, 1614 bp, synthetic construct
  misc_feature 1..1614: note = Variant of B-Glucocerebrosidase
  source 1..1614: mol_type = other DNA
atggagttttcttctcctagtagagaagaatgccccaagccactgagcagggtgagcatcatggctggatccctcacagggctgcttcttttgcaggcagtctcatgggcctctggagccaggccctgtattcccaagtcattcggctactcctcagtggtgtgtgtatgcaatgccacctattgtgacagtttcgatcctccaactctccctgctctgggtaccttcattcggtatgagagcacaagaagtggaagacgcatggagctctcaatgggccctatacaggctaaccacactgggacaggtctgctgctgaccctccaacctgaacagaagtttcagaaagtcaagggatttggaggagccatgactgatgcagcagcactcaacatcttggccctgtctccaccagcccagaatctgctgttgaagtcctacttctcagaggaggggattggctacaacatcatccgggttcccatggctagctgtgacttctccattaggacctatacatacgctgacacccccgatgattttcagctccataatttcagtctccctgaagaagacaccaaactgaagatacctctgattcacagagccttgcaactgtcccaaaggccagtgagcctcttcgcttctccctggactagtcctacatggctgaagactaatggtgctgttaatgggaaaggctccctgaaaggacagccaggtgacatatatcatcagacatgggcccgctactttgtgaaattccttgatgcctatgcagagcacaagctccaattctgggcagtcaccgcagaaaacgagccctcagctgggctgctgtctggctacccctttcagtgcttgggctttactcctgagcatcaacgggacttcattgcccgggatttggggccaacactggccaacagcacccaccacaatgtaagactcctcatgctggatgaccagaggctgctgctccctcattgggccaaggtggtgttgacagacccagaagctgccaaatatgttcatggcatcgctgtccactggtacctggattttttggcccctgcaaaggctactctgggagagacccacagactcttccccaataccatgctgtttgcatcagaagcctgcgtggggagcaaattctgggagcagtctgttaggctgggttcctgggatcggggcatgcaatattcccatagtataataactaacctcctctaccacgtggtaggatggacagactggaatctggctttgaacccagaaggaggccccaattgggtgcgcaactttgttgacagccccatcattgtggatatcacaaaggacaccttctacaaacagcctatgttctatcatctggggcactttagcaagttcattccagagggttcccagagagtaggcttggttgcctcacagaagaatgatctggatgctgtggcactcctgcatcctgacgggagtgcagtggtggtagtactgaacaggtctagcaaagatgttcccttgactatcaaagacccagctgtgggctttctggaaaccatttcccctggatactctatccacacctatctctggagaagacagtaatga

SEQ ID NO: 504 - protein, 536 aa, synthetic construct
  REGION 1..536: note = Variant of B-Glucocerebrosidase
MEFSSPSREECPKPLSRVSIMAGSLTGLLLLQAVSWASGARPCIPKSFGYSSVVCVCNATYCDSFDPPTLPALGTFIRYESTRSGRRMELSMGPIQANHTGTGLLLTLQPEQKFQKVKGFGGAMTDAAALNILALSPPAQNLLLKSYFSEEGIGYNIIRVPMASCDFSIRTYTYADTPDDFQLHNFSLPEEDTKLKIPLIHRALQLSQRPVSLFASPWTSPTWLKTNGAVNGKGSLKGQPGDIYHQTWARYFVKFLDAYAEHKLQFWAVTAENEPSAGLLSGYPFQCLGFTPEHQRDFIARDLGPTLANSTHHNVRLLMLDDQRLLLPHWAKVVLTDPEAAKYVHGIAVHWYLDFLAPAKATLGETHRLFPNTMLFASEACVGSKFWEQSVRLGSWDRGMQYSHSIITNLLYHVVGWTDWNLALNPEGGPNWVRNFVDSPIIVDITKDTFYKQPMFYHLGHFSKFIPEGSQRVGLVASQKNDLDAVALLHPDGSAVVVVLNRSSKDVPLTIKDPAVGFLETISPGYSIHTYLWRRQ

SEQ ID NO: 505 - DNA, 1614 bp, synthetic construct
  misc_feature 1..1614: note = Variant of B-Glucocerebrosidase
  source 1..1614: mol_type = other DNA
atggagttttcttctcctagtagagaagaatgccccaagccactgagcagggtgagcatcatggctggatccctcacagggctgcttcttttgcaggcagtctcatgggcctctggagccaggccctgtattcccaagtcattcggctactcctcagtggtgtgtgtatgcaatgccacctattgtgacagtttcgatcctccaactctccctgctctgggtaccttctcccggtatgagagcacaagaagtggaagacgcatggagctctcaatgggccctatacaggctaaccacactgggacaggtctgctgctgaccctccaacctgaacagaagtttcagaaagtcaagggatttggaggagccatgactgatgcagcagcactcaacatcttggccctgtctccaccagcccagaatctgctgttgaagtcctacttctcagaggaggggattggctacaacatcatccgggttcccatggctagctgtgacttctccattaggacctatacatacgctgacacccccgatgattttcagctccataatttcagtctccctgaagaagacaccaaactgaagatacctctgattcacagagccttgcaactgtcccaaaggccagtgagcctcttcgcttctccctggactagtcctacatggctgaagactaatggtgctgttaatgggaaaggctccctgaaaggacagccaggtgacatatatcatcagacatgggcccgctactttgtgaaattccttgatgcctatgcagagcacaagctccaattctgggcagtcaccgcagaaaacgagccctcagctgggctgctgtctggctacccctttcagtgcttgggctttactcctgagcatcaacgggacttcattgcccgggatttggggccaacactggccaacagcacccaccacaatgtaagactcctcatgctggatgaccagaggctgctgctccctcattgggccaaggtggtgttgacagacccagaagctgccaaatatgttcatggcatcgctgtccactggtacctggattttttggcccctgcaaaggctactctgggagagacccacagactcttccccaataccatgctgtttgcatcagaagcctgcgtggggagcaaattctgggagcagtctgttaggctgggttcctgggatcggggcatgcaatattcccatagtataataactaacctcctctaccacgtggtaggatggacagactggaatctggctttgaacccagaaggaggccccaattgggtgcgcaactttgttgacagccccatcattgtggatatcacaaaggacaccttctacaaacagcctatgttctatcatctggggcactttagcaagttcattccagagggttcccagagagtaggcttggttgcctcacagaagaatgatctggatgctgtggcactcctgcatcctgacgggagtgcagtggtggtagtactgaacaggtctagcaaagattatcccttgactatcaaagacccagctgtgggctttctggaaaccatttcccctggatactctatccacacctatctctggagaagacagtaatga

SEQ ID NO: 506 - protein, 536 aa, synthetic construct
  REGION 1..536: note = Variant of B-Glucocerebrosidase
MEFSSPSREECPKPLSRVSIMAGSLTGLLLLQAVSWASGARPCIPKSFGYSSVVCVCNATYCDSFDPPTLPALGTFSRYESTRSGRRMELSMGPIQANHTGTGLLLTLQPEQKFQKVKGFGGAMTDAAALNILALSPPAQNLLLKSYFSEEGIGYNIIRVPMASCDFSIRTYTYADTPDDFQLHNFSLPEEDTKLKIPLIHRALQLSQRPVSLFASPWTSPTWLKTNGAVNGKGSLKGQPGDIYHQTWARYFVKFLDAYAEHKLQFWAVTAENEPSAGLLSGYPFQCLGFTPEHQRDFIARDLGPTLANSTHHNVRLLMLDDQRLLLPHWAKVVLTDPEAAKYVHGIAVHWYLDFLAPAKATLGETHRLFPNTMLFASEACVGSKFWEQSVRLGSWDRGMQYSHSIITNLLYHVVGWTDWNLALNPEGGPNWVRNFVDSPIIVDITKDTFYKQPMFYHLGHFSKFIPEGSQRVGLVASQKNDLDAVALLHPDGSAVVVVLNRSSKDYPLTIKDPAVGFLETISPGYSIHTYLWRRQ

SEQ ID NO: 507 - DNA, 1614 bp, synthetic construct
  misc_feature 1..1614: note = Variant of B-Glucocerebrosidase
  source 1..1614: mol_type = other DNA
atggagttttcttctcctagtagagaagaatgccccaagccactgagcagggtgagcatcatggctggatccctcacagggctgcttcttttgcaggcagtctcatgggcctctggagccaggccctgtattcccaagtcattcggctactcctcagtggtgtgtgtatgcaatgccacctattgtgacagtttcgatcctccaactctccctgctctgggtaccttctcccggtatgagagcacaagaagtggaagacgcatggagctctcaatgggccctatacaggctaaccacactgggacaggtctgctgctgtgtctccaacctgaacagaagtttcagaaagtcaagggatttggaggagccatgactgatgcagcagcactcaacatcttggccctgtctccaccagcccagaatctgctgttgaagtcctacttctcagaggaggggattggctacaacatcatccgggttcccatggctagctgtgacttctccattaggacctatacatacgctgacacccccgatgattttcagctccataatttcagtctccctgaagaagacaccaaactgaagatacctctgattcacagagccttgcaactgtcccaaaggccagtgagcctcttcgcttctccctggactagtcctacatggctgaagactaatggtgctgttaatgggaaaggctccctgaaaggacagccaggtgacatatatcatcagacatgggcccgctactttgtgaaattccttgatgcctatgcagagcacaagctccaattctgggcagtcaccgcagaaaacgagccctcagctgggctgctgtctggctacccctttcagtgcttgggctttactcctgagcatcaacgggacttcattgcccgggatttggggccaacactggccaacagcacccaccacaatgtaagactcctcatgctggatgaccagaggctgctgctccctcattgggccaaggtggtgttgacagacccagaagctgccaaatatgttcatggcatcgctgtccactggtacctggattttttggcccctgcaaaggctactctgggagagacccacagactcttccccaataccatgctgtttgcatcagaagcctgcgtggggagcaaattctgggagcagtctgttaggctgggttcctgggatcggggcatgcaatattcccatagtataataactaacctcctctaccacgtggtaggatggacagactggaatctggctttgaacccagaaggaggccccaattgggtgcgcaactttgttgacagccccatcattgtggatatcacaaaggacaccttctacaaacagcctatgttctatcatctggggcactttagcaagttcattccagagggttcccagagagtaggcttggttgcctcacagaagaatgatctggatgctgtggcactcctgcatcctgacgggagtgcagtggtggtagtactgaacaggtctagcaaagatgttcccttgactatcaaagacccagctgtgggctttctggaaaccatttcccctggatactctatccacacctatctctggagaagacagtaatga

SEQ ID NO: 508 - protein, 536 aa, synthetic construct
  REGION 1..536: note = Variant of B-Glucocerebrosidase
MEFSSPSREECPKPLSRVSIMAGSLTGLLLLQAVSWASGARPCIPKSFGYSSVVCVCNATYCDSFDPPTLPALGTFSRYESTRSGRRMELSMGPIQANHTGTGLLLCLQPEQKFQKVKGFGGAMTDAAALNILALSPPAQNLLLKSYFSEEGIGYNIIRVPMASCDFSIRTYTYADTPDDFQLHNFSLPEEDTKLKIPLIHRALQLSQRPVSLFASPWTSPTWLKTNGAVNGKGSLKGQPGDIYHQTWARYFVKFLDAYAEHKLQFWAVTAENEPSAGLLSGYPFQCLGFTPEHQRDFIARDLGPTLANSTHHNVRLLMLDDQRLLLPHWAKVVLTDPEAAKYVHGIAVHWYLDFLAPAKATLGETHRLFPNTMLFASEACVGSKFWEQSVRLGSWDRGMQYSHSIITNLLYHVVGWTDWNLALNPEGGPNWVRNFVDSPIIVDITKDTFYKQPMFYHLGHFSKFIPEGSQRVGLVASQKNDLDAVALLHPDGSAVVVVLNRSSKDVPLTIKDPAVGFLETISPGYSIHTYLWRRQ

SEQ ID NO: 509 - DNA, 1614 bp, synthetic construct
  misc_feature 1..1614: note = Variant of B-Glucocerebrosidase
  source 1..1614: mol_type = other DNA
atggagttttcttctcctagtagagaagaatgccccaagccactgagcagggtgagcatcatggctggatccctcacagggctgcttcttttgcaggcagtctcatgggcctctggagccaggccctgtattcccaagtcattcggctactcctcagtggtgtgtgtatgcaatgccacctattgtgacagtttcgatcctccaactctccctgctctgggtaccttctcccggtatgagagcacaagaagtggaagacgcatggagctctcaatgggccctatacaggctaaccacactgggacaggtctgctgctgaccctccaacctgaacagaagtttcagaaagtcaagggatttggaggagccatgactgatgcagcagcactcaacatcttggccctgtctccaccagcccagaatctgctgttgaagtcctacttctcagaggaggggattggctacaacatcatccgggttcccatggctagctgtgacttctccattaggacctatacatacgctgacacccccgatgattttcagctccataatttcagtctccctgaagaagacaccaaactgaagatacctctgattcacagagccttgcaactgtcccaaaggccagtgagcctcttcgcttctccctggactagtcctacatggctgaagactaatggtgctgttaatgggaaaggctccctgaaaggacagccaggtgacatatatcatcagacatgggcccgctactttgtgaaattccttgatgcctatgcagagcacaagctccaattctgggcagtcaccgcagaaaacgagccctcagctgggctgctgtctggctacccctttcagtgcttgggctttactcctgagcatcaacgggacttcattgcccgggatttggggccaacactggccaacagcacccaccacaatgtaagactcctcatgctggatgaccagaggctgctgctccctcattgggccaaggtggtgttgacagacccagaagctgccaaatatgttcatggcatcgctgtccactggtacctggattttttggcccctgcaaaggctactctgggagagacccacagactcttccccaataccatgctgtttgcatcagaagcctgcgtggggagcaaattctgggagcagtctgttaggctgggttcctgggatcggggcatgcaatattcccatagtataataactaacctcctctaccacgtggtaggatggacagactggaatctggctttgaacccagaaggaggccccaattgggtgcgcaactttgttgacagccccatcattgtggatatcacaaaggacaccttctacaaacagcctatgttctatcatctggggcactttagcaagttcattccagagggttcccagagagtaggcttggttgcctcacagaagaatgatctggatgctgtggcactcctgcatcctgacgggagtgcagtggtggtagtactgaacaggtctagcaaagatgttcccttgactatcaaagacccagctgtgggcagtctggaaaccatttcccctggatactctatccacacctatctctggagaagacagtaatga

SEQ ID NO: 510 - protein, 536 aa, synthetic construct
  REGION 1..536: note = Variant of B-Glucocerebrosidase
MEFSSPSREECPKPLSRVSIMAGSLTGLLLLQAVSWASGARPCIPKSFGYSSVVCVCNATYCDSFDPPTLPALGTFSRYESTRSGRRMELSMGPIQANHTGTGLLLTLQPEQKFQKVKGFGGAMTDAAALNILALSPPAQNLLLKSYFSEEGIGYNIIRVPMASCDFSIRTYTYADTPDDFQLHNFSLPEEDTKLKIPLIHRALQLSQRPVSLFASPWTSPTWLKTNGAVNGKGSLKGQPGDIYHQTWARYFVKFLDAYAEHKLQFWAVTAENEPSAGLLSGYPFQCLGFTPEHQRDFIARDLGPTLANSTHHNVRLLMLDDQRLLLPHWAKVVLTDPEAAKYVHGIAVHWYLDFLAPAKATLGETHRLFPNTMLFASEACVGSKFWEQSVRLGSWDRGMQYSHSIITNLLYHVVGWTDWNLALNPEGGPNWVRNFVDSPIIVDITKDTFYKQPMFYHLGHFSKFIPEGSQRVGLVASQKNDLDAVALLHPDGSAVVVVLNRSSKDVPLTIKDPAVGSLETISPGYSIHTYLWRRQ

SEQ ID NO: 511 - DNA, 1614 bp, synthetic construct
  misc_feature 1..1614: note = Variant of B-Glucocerebrosidase
  source 1..1614: mol_type = other DNA
atggagttttcttctcctagtagagaagaatgccccaagccactgagcagggtgagcatcatggctggatccctcacagggctgcttcttttgcaggcagtctcatgggcctctggagccaggccctgtattcccaagtcattcggctactcctcagtggtgtgtgtatgcaatgccacctattgtgacagtttcgatcctccaactctccctgctctgggtaccttctcccggtatgagagcacaagaagtggaagacgcatggagctctcaatgggccctatacaggctaaccacactgggacaggtctgctgctgaccctccaacctgaacagaagtttcagaaagtcaagggatttggaggagccatgactgatgcagcagcactcaacatcttggccctgtctccaccagcccagaatctgctgttgaagtcctacttctcagaggaggggattggctacaacatcatccgggttcccatggctagctgtgacttctccattaggacctatacatacgctgacacccccgatgattttcagctccataatttcagtctccctgaagaagacaccaaactgaagatacctctgattcacagagccttgcaactgtcccaaaggccagtggcgctcttcgcttctccctggactagtcctacatggctgaagactaatggtgctgttaatgggaaaggctccctgaaaggacagccaggtgacatatatcatcagacatgggcccgctactttgtgaaattccttgatgcctatgcagagcacaagctccaattctgggcagtcaccgcagaaaacgagccctcagctgggctgctgtctggctacccctttcagtgcttgggctttactcctgagcatcaacgggacttcattgcccgggatttggggccaacactggccaacagcacccaccacaatgtaagactcctcatgctggatgaccagaggctgctgctccctcattgggccaaggtggtgttgacagacccagaagctgccaaatatgttcatggcatcgctgtccactggtacctggattttttggcccctgcaaaggctactctgggagagacccacagactcttccccaataccatgctgtttgcatcagaagcctgcgtggggagcaaattctgggagcagtctgttaggctgggttcctgggatcggggcatgcaatattcccatagtataataactaacctcctctaccacgtggtaggatggacagactggaatctggctttgaacccagaaggaggccccaattgggtgcgcaactttgttgacagccccatcattgtggatatcacaaaggacaccttctacaaacagcctatgttctatcatctggggcactttagcaagttcattccagagggttcccagagagtaggcttggttgcctcacagaagaatgatctggatgctgtggcactcctgcatcctgacgggagtgcagtggtggtagtactgaacaggtctagcaaagatgttcccttgactatcaaagacccagctgtgggctttctggaaaccatttcccctggatactctatccacacctatctctggagaagacagtaatga

SEQ ID NO: 512 - protein, 536 aa, synthetic construct
  REGION 1..536: note = Variant of B-Glucocerebrosidase
MEFSSPSREECPKPLSRVSIMAGSLTGLLLLQAVSWASGARPCIPKSFGYSSVVCVCNATYCDSFDPPTLPALGTFSRYESTRSGRRMELSMGPIQANHTGTGLLLTLQPEQKFQKVKGFGGAMTDAAALNILALSPPAQNLLLKSYFSEEGIGYNIIRVPMASCDFSIRTYTYADTPDDFQLHNFSLPEEDTKLKIPLIHRALQLSQRPVALFASPWTSPTWLKTNGAVNGKGSLKGQPGDIYHQTWARYFVKFLDAYAEHKLQFWAVTAENEPSAGLLSGYPFQCLGFTPEHQRDFIARDLGPTLANSTHHNVRLLMLDDQRLLLPHWAKVVLTDPEAAKYVHGIAVHWYLDFLAPAKATLGETHRLFPNTMLFASEACVGSKFWEQSVRLGSWDRGMQYSHSIITNLLYHVVGWTDWNLALNPEGGPNWVRNFVDSPIIVDITKDTFYKQPMFYHLGHFSKFIPEGSQRVGLVASQKNDLDAVALLHPDGSAVVVVLNRSSKDVPLTIKDPAVGFLETISPGYSIHTYLWRRQ

SEQ ID NO: 513 - DNA, 1614 bp, synthetic construct
  misc_feature 1..1614: note = Variant of B-Glucocerebrosidase
  source 1..1614: mol_type = other DNA
atggagttttcttctcctagtagagaagaatgccccaagccactgagcagggtgagcatcatggctggatccctcacagggctgcttcttttgcaggcagtctcatgggcctctggagccaggccctgtattcccaagtcattcggctactcctcagtggtgtgtgtatgcaatgccacctattgtgacagtttcgatcctccaactctctttgctctgggtaccttctcccggtatgagagcacaagaagtggaagacgcatggagctctcaatgggccctatacaggctaaccacactgggacaggtctgctgctgaccctccaacctgaacagaagtttcagaaagtcaagggatttggaggagccatgactgatgcagcagcactcaacatcttggccctgtctccaccagcccagaatctgctgttgaagtcctacttctcagaggaggggattggctacaacatcatccgggttcccatggctagctgtgacttctccattaggacctatacatacgctgacacccccgatgattttcagctccataatttcagtctccctgaagaagacaccaaactgaagatacctctgattcacagagccttgcaactgtcccaaaggccagtgagcctcttcgcttctccctggactagtcctacatggctgaagactaatggtgctgttaatgggaaaggctccctgaaaggacagccaggtgacatatatcatcagacatgggcccgctactttgtgaaattccttgatgcctatgcagagcacaagctccaattctgggcagtcaccgcagaaaacgagccctcagctgggctgctgtctggctacccctttcagtgcttgggctttactcctgagcatcaacgggacttcattgcccgggatttggggccaacactggccaacagcacccaccacaatgtaagactcctcatgctggatgaccagaggctgctgctccctcattgggccaaggtggtgttgacagacccagaagctgccaaatatgttcatggcatcgctgtccactggtacctggattttttggcccctgcaaaggctactctgggagagacccacagactcttccccaataccatgctgtttgcatcagaagcctgcgtggggagcaaattctgggagcagtctgttaggctgggttcctgggatcggggcatgcaatattcccatagtataataactaacctcctctaccacgtggtaggatggacagactggaatctggctttgaacccagaaggaggccccaattgggtgcgcaactttgttgacagccccatcattgtggatatcacaaaggacaccttctacaaacagcctatgttctatcatctggggcactttagcaagttcattccagagggttcccagagagtaggcttggttgcctcacagaagaatgatctggatgctgtggcactcctgcatcctgacgggagtgcagtggtggtagtactgaacaggtctagcaaagatgttcccttgactatcaaagacccagctgtgggctttctggaaaccatttcccctggatactctatccacacctatctctggagaagacagtaatga

SEQ ID NO: 514 - protein, 536 aa, synthetic construct
  REGION 1..536: note = Variant of B-Glucocerebrosidase
MEFSSPSREECPKPLSRVSIMAGSLTGLLLLQAVSWASGARPCIPKSFGYSSVVCVCNATYCDSFDPPTLFALGTFSRYESTRSGRRMELSMGPIQANHTGTGLLLTLQPEQKFQKVKGFGGAMTDAAALNILALSPPAQNLLLKSYFSEEGIGYNIIRVPMASCDFSIRTYTYADTPDDFQLHNFSLPEEDTKLKIPLIHRALQLSQRPVSLFASPWTSPTWLKTNGAVNGKGSLKGQPGDIYHQTWARYFVKFLDAYAEHKLQFWAVTAENEPSAGLLSGYPFQCLGFTPEHQRDFIARDLGPTLANSTHHNVRLLMLDDQRLLLPHWAKVVLTDPEAAKYVHGIAVHWYLDFLAPAKATLGETHRLFPNTMLFASEACVGSKFWEQSVRLGSWDRGMQYSHSIITNLLYHVVGWTDWNLALNPEGGPNWVRNFVDSPIIVDITKDTFYKQPMFYHLGHFSKFIPEGSQRVGLVASQKNDLDAVALLHPDGSAVVVVLNRSSKDVPLTIKDPAVGFLETISPGYSIHTYLWRRQ

SEQ ID NO: 515 - DNA, 1614 bp, synthetic construct
  misc_feature 1..1614: note = Variant of B-Glucocerebrosidase
  source 1..1614: mol_type = other DNA
atggagttttcttctcctagtagagaagaatgccccaagccactgagcagggtgagcatcatggctggatccctcacagggctgcttcttttgcaggcagtctcatgggcctctggagccaggccctgtattcccaagtcattcggctactcctcagtggtgtgtgtatgcaatgccacctattgtgacagtttcgatcctccaactctccctgctctgggtaccttctcccggtatgagagcacaagaagtggaagacgcatggagctctcaatgggccctatacaggctaaccacactgggacaggtctgctgctgaccctccaacctgaacagaagtttcagaaagtcaagggatttggaggagccatgactgatgcagcagcactcaacatcttggccctgtctccaccagcccagaatctgctgttgaagtcctacttctcagaggaggggattggctacaacatcatccgggttcccatggctagctgtgacttctccattaggacctatacatacgctgacacccccgatgattttcagctccataatttcagtctccctgaagaagacaccaaactgaagatacctctgattcacagagccttgcaactgtcccaaaggccagtgagcctcttcgcttctccctggactagtcctacatggctgaagactaatggtgctgttaatgggaaaggctccctgaaaggacagccaggtgacatatatcatcagacatgggcccgctactttgtgaaattccttgatgcctatgcagagcacaagctccaattctgggcagtcaccgcagaaaacgagccctcagctgggctgctgtctggctacccctttcagtgcttgggctttactcctgagcatcaacgggacttcattgcccgggatttggggccaacactggccaacagcacccaccacaatgtaagactcctcatgctggatgaccagaggctgctgctccctcattgggccaaggtggtgttgacagacccagaagctgccaaatatgttcatggcatcgctgtccactggtacctggattttttggcccctgcaaaggctactctgggagagacccacagactcttccccaataccatgctgtttgcatcagaagcctgcgtggggagcaaattctgggagcagtctgttaggctgggttcctgggatcggggcatgcaatattcccatagtataataactaacctcctctaccacgtggtaggatggacagactggaatctggctttgaacccagaaggaggccccaattgggtgcgcaactttgttgacagccccatcattgtggatatcacaaaggacaccttctacaaacagcctatgttctatcatctggggcactttagcaagttcattccagagggttcccagagagtaggcttggttgcctcacagaagaatgatctggatgctgtggcactcctgcatcctgacgggagtgcagtggtggtagtactgaacaggtctagcaaagatgttcccttgactatcaaagacccagctgtgggctttctggaaaccatttccccttgttactctatccacacctatctctggagaagacagtaatga

SEQ ID NO: 516 - protein, 536 aa, synthetic construct
  REGION 1..536: note = Variant of B-Glucocerebrosidase
MEFSSPSREECPKPLSRVSIMAGSLTGLLLLQAVSWASGARPCIPKSFGYSSVVCVCNATYCDSFDPPTLPALGTFSRYESTRSGRRMELSMGPIQANHTGTGLLLTLQPEQKFQKVKGFGGAMTDAAALNILALSPPAQNLLLKSYFSEEGIGYNIIRVPMASCDFSIRTYTYADTPDDFQLHNFSLPEEDTKLKIPLIHRALQLSQRPVSLFASPWTSPTWLKTNGAVNGKGSLKGQPGDIYHQTWARYFVKFLDAYAEHKLQFWAVTAENEPSAGLLSGYPFQCLGFTPEHQRDFIARDLGPTLANSTHHNVRLLMLDDQRLLLPHWAKVVLTDPEAAKYVHGIAVHWYLDFLAPAKATLGETHRLFPNTMLFASEACVGSKFWEQSVRLGSWDRGMQYSHSIITNLLYHVVGWTDWNLALNPEGGPNWVRNFVDSPIIVDITKDTFYKQPMFYHLGHFSKFIPEGSQRVGLVASQKNDLDAVALLHPDGSAVVVVLNRSSKDVPLTIKDPAVGFLETISPCYSIHTYLWRRQ

SEQ ID NO: 517 - DNA, 1614 bp, synthetic construct
  misc_feature 1..1614: note = Variant of B-Glucocerebrosidase
  source 1..1614: mol_type = other DNA
atggagttttcttctcctagtagagaagaatgccccaagccactgagcagggtgagcatcatggctggatccctcacagggctgcttcttttgcaggcagtctcatgggcctctggagccaggccctgtattcccaagtcattcggctactcctcagtggtgtgtgtatgcaatgccacctattgtgacagtttcgatcctccaactctccctgctctgggtaccttctcccggtatgagagcacaagaagtggaagacgcatggagctctcaatgggccctatacaggctaaccacactgggacaggtctgctgctgaccctccaacctgaacagaagtttcagaaagtcaagggatttggaggagccatgactgatgcagcagcactcaacatcttggccctgtctccaccagcccagaatctgctgttgaagtcctacttctcagaggaggggattggctacaacatcatccgggttcccatggctagctgtgacttctccattaggacctatacatacgctgacacccccgatgattttcagctccataatttcagtctccctgaagaagacaccaaactgaagatacctctgattcacagagccttgcaactgtcccaaaggccagtgagcctcttcgcttctccctggactagtcctacatggctgaagactaatggtgctgttaatgggaaaggctccctgaaaggacagccaggtgacatatatcatcagacatgggcccgctactttgtgaaattccttgatgcctatgcagagcacaagctccaattctgggcagtcaccgcagaaaacgagccctcagctgggctgctgtctggctacccctttcagtgcttgggctttactcctgagcatcaacgggacttcattgcccgggatttggggccaacactggccaacagcacccaccacaatgtaagactcctcatgctggatgaccagaggctgctgctccctcattgggccaaggtggtgttgacagacccagaagctgccaaatatgttcatggcatcgctgtccactggtacctggattttttggcccctgcaaaggctactctgggagagacccacagactcttccccaataccatgctgtttgcatcagaagcctgcgtggggagcaaattctgggagcagtctgttaggctgggttcctgggatcggggcatgcaatattcccatagtataataactaacctcctctaccacgtggtaggatggacagactggaatctggctttgaacccagaaggaggccccaattgggtgcgcaactttgttgacagccccatcattgtggatatcacaaaggaccggttctacaaacagcctatgttctatcatctggggcactttagcaagttcattccagagggttcccagagagtaggcttggttgcctcacagaagaatgatctggatgctgtggcactcctgcatcctgacgggagtgcagtggtggtagtactgaacaggtctagcaaagatgttcccttgactatcaaagacccagctgtgggctttctggaaaccatttcccctggatactctatccacacctatctctggagaagacagtaatga

SEQ ID NO: 518 - protein, 536 aa, synthetic construct
  REGION 1..536: note = Variant of B-Glucocerebrosidase
MEFSSPSREECPKPLSRVSIMAGSLTGLLLLQAVSWASGARPCIPKSFGYSSVVCVCNATYCDSFDPPTLPALGTFSRYESTRSGRRMELSMGPIQANHTGTGLLLTLQPEQKFQKVKGFGGAMTDAAALNILALSPPAQNLLLKSYFSEEGIGYNIIRVPMASCDFSIRTYTYADTPDDFQLHNFSLPEEDTKLKIPLIHRALQLSQRPVSLFASPWTSPTWLKTNGAVNGKGSLKGQPGDIYHQTWARYFVKFLDAYAEHKLQFWAVTAENEPSAGLLSGYPFQCLGFTPEHQRDFIARDLGPTLANSTHHNVRLLMLDDQRLLLPHWAKVVLTDPEAAKYVHGIAVHWYLDFLAPAKATLGETHRLFPNTMLFASEACVGSKFWEQSVRLGSWDRGMQYSHSIITNLLYHVVGWTDWNLALNPEGGPNWVRNFVDSPIIVDITKDRFYKQPMFYHLGHFSKFIPEGSQRVGLVASQKNDLDAVALLHPDGSAVVVVLNRSSKDVPLTIKDPAVGFLETISPGYSIHTYLWRRQ

SEQ ID NO: 519 - DNA, 1614 bp, synthetic construct
  misc_feature 1..1614: note = Variant of B-Glucocerebrosidase
  source 1..1614: mol_type = other DNA
atggagttttcttctcctagtagagaagaatgccccaagccactgagcagggtgagcatcatggctggatccctcacagggctgcttcttttgcaggcagtctcatgggcctctggagccaggccctgtattcccaagtcattcggctactcctcagtggtgtgtgtatgcaatgccacctattgtgacagtttcgatcctccaactctccctgctctgggtaccttctcccggtatgagagcacaagaagtggaagacgcatggagctctcaatgggccctatacaggctaaccacactgggacaggtctgctgctgatgctccaacctgaacagaagtttcagaaagtcaagggatttggaggagccatgactgatgcagcagcactcaacatcttggccctgtctccaccagcccagaatctgctgttgaagtcctacttctcagaggaggggattggctacaacatcatccgggttcccatggctagctgtgacttctccattaggacctatacatacgctgacacccccgatgattttcagctccataatttcagtctccctgaagaagacaccaaactgaagatacctctgattcacagagccttgcaactgtcccaaaggccagtgagcctcttcgcttctccctggactagtcctacatggctgaagactaatggtgctgttaatgggaaaggctccctgaaaggacagccaggtgacatatatcatcagacatgggcccgctactttgtgaaattccttgatgcctatgcagagcacaagctccaattctgggcagtcaccgcagaaaacgagccctcagctgggctgctgtctggctacccctttcagtgcttgggctttactcctgagcatcaacgggacttcattgcccgggatttggggccaacactggccaacagcacccaccacaatgtaagactcctcatgctggatgaccagaggctgctgctccctcattgggccaaggtggtgttgacagacccagaagctgccaaatatgttcatggcatcgctgtccactggtacctggattttttggcccctgcaaaggctactctgggagagacccacagactcttccccaataccatgctgtttgcatcagaagcctgcgtggggagcaaattctgggagcagtctgttaggctgggttcctgggatcggggcatgcaatattcccatagtataataactaacctcctctaccacgtggtaggatggacagactggaatctggctttgaacccagaaggaggccccaattgggtgcgcaactttgttgacagccccatcattgtggatatcacaaaggacaccttctacaaacagcctatgttctatcatctggggcactttagcaagttcattccagagggttcccagagagtaggcttggttgcctcacagaagaatgatctggatgctgtggcactcctgcatcctgacgggagtgcagtggtggtagtactgaacaggtctagcaaagatgttcccttgactatcaaagacccagctgtgggctttctggaaaccatttcccctggatactctatccacacctatctctggagaagacagtaatga

SEQ ID NO: 520 - protein, 536 aa, synthetic construct
  REGION 1..536: note = Variant of B-Glucocerebrosidase
MEFSSPSREECPKPLSRVSIMAGSLTGLLLLQAVSWASGARPCIPKSFGYSSVVCVCNATYCDSFDPPTLPALGTFSRYESTRSGRRMELSMGPIQANHTGTGLLLMLQPEQKFQKVKGFGGAMTDAAALNILALSPPAQNLLLKSYFSEEGIGYNIIRVPMASCDFSIRTYTYADTPDDFQLHNFSLPEEDTKLKIPLIHRALQLSQRPVSLFASPWTSPTWLKTNGAVNGKGSLKGQPGDIYHQTWARYFVKFLDAYAEHKLQFWAVTAENEPSAGLLSGYPFQCLGFTPEHQRDFIARDLGPTLANSTHHNVRLLMLDDQRLLLPHWAKVVLTDPEAAKYVHGIAVHWYLDFLAPAKATLGETHRLFPNTMLFASEACVGSKFWEQSVRLGSWDRGMQYSHSIITNLLYHVVGWTDWNLALNPEGGPNWVRNFVDSPIIVDITKDTFYKQPMFYHLGHFSKFIPEGSQRVGLVASQKNDLDAVALLHPDGSAVVVVLNRSSKDVPLTIKDPAVGFLETISPGYSIHTYLWRRQ

SEQ ID NO: 521 - DNA, 1614 bp, synthetic construct
  misc_feature 1..1614: note = Variant of B-Glucocerebrosidase
  source 1..1614: mol_type = other DNA
atggagttttcttctcctagtagagaagaatgccccaagccactgagcagggtgagcatcatggctggatccctcacagggctgcttcttttgcaggcagtctcatgggcctctggagccaggccctgtattcccaagtcattcggctactcctcagtggtgtgtgtatgcaatgccacctattgtgacagtttcgatcctccaactctccctgctctgggtaccttctcccggtatgagagcacaagaagtggaagacgcatggagctctcaatgggccctatacaggctaaccacactgggacaggtctgctgctgaccctccaacctgaacagaagtttcagaaagtcaagggatttggaggagccatgactgatgcagcagcactcaacatcttggccctgtctccaccagcccagaatctgctgttgaagtcctacttctcagaggaggggattggctacaacatcatccgggttcccatggctagctgtgacttctccattaggacctatacatacgctgacacccccgatgattttcagctccataatttcagtctccctgaagaagacaccaaactgaagatacctctgattcacagagccttgcaactgtcccaaaggccagtgagcctcttcgcttctccctggactagtcctacatggctgaagactaatggtgctgttaatgggaaaggctccctgaaaggacagccaggtgacatatatcatcagacatgggcccgctactttgtgaaattccttgatgcctatgcagagcacaagctccaattctgggcagtcaccgcagaaaacgagccctcagctgggctgctgtctggctacccctttcagtgcttgggctttactcctgagcatcaacgggacttcattgcccgggatttggggccaacactggccaacagcacccaccacaatgtaagactcctcatgctggatgaccagaggctgctgctccctcattgggccaaggtggtgttgacagacccagaagctgccaaatatgttcatggcatcgctgtccactggtacctggattttttggcccctgcaaaggctactctgggagagacccacagactcttccccaataccatgctgtttgcatcagaagcctgcgtggggagcaaattctgggagcagtctgttaggctgggttcctgggatcggggcatgcaatattcccatagtataataactaacctcctctaccacgtggtaggatggacagactggaatctggctttgaacccagaaggaggccccaattgggtgcgcaactttgttgacagccccatcattgtggatatcacaaaggacaccttctacaaacagcctatgttctatcatctggggcactttagcaagttcattcatgagggttcccagagagtaggcttggttgcctcacagaagaatgatctggatgctgtggcactcctgcatcctgacgggagtgcagtggtggtagtactgaacaggtctagcaaagatgttcccttgactatcaaagacccagctgtgggctttctggaaaccatttcccctggatactctatccacacctatctctggagaagacagtaatga

SEQ ID NO: 522 - protein, 536 aa, synthetic construct
  REGION 1..536: note = Variant of B-Glucocerebrosidase
MEFSSPSREECPKPLSRVSIMAGSLTGLLLLQAVSWASGARPCIPKSFGYSSVVCVCNATYCDSFDPPTLPALGTFSRYESTRSGRRMELSMGPIQANHTGTGLLLTLQPEQKFQKVKGFGGAMTDAAALNILALSPPAQNLLLKSYFSEEGIGYNIIRVPMASCDFSIRTYTYADTPDDFQLHNFSLPEEDTKLKIPLIHRALQLSQRPVSLFASPWTSPTWLKTNGAVNGKGSLKGQPGDIYHQTWARYFVKFLDAYAEHKLQFWAVTAENEPSAGLLSGYPFQCLGFTPEHQRDFIARDLGPTLANSTHHNVRLLMLDDQRLLLPHWAKVVLTDPEAAKYVHGIAVHWYLDFLAPAKATLGETHRLFPNTMLFASEACVGSKFWEQSVRLGSWDRGMQYSHSIITNLLYHVVGWTDWNLALNPEGGPNWVRNFVDSPIIVDITKDTFYKQPMFYHLGHFSKFIHEGSQRVGLVASQKNDLDAVALLHPDGSAVVVVLNRSSKDVPLTIKDPAVGFLETISPGYSIHTYLWRRQ

SEQ ID NO: 523 - DNA, 1614 bp, synthetic construct
  misc_feature 1..1614: note = Variant of B-Glucocerebrosidase
  source 1..1614: mol_type = other DNA
atggagttttcttctcctagtagagaagaatgccccaagccactgagcagggtgagcatcatggctggatccctcacagggctgcttcttttgcaggcagtctcatgggcctctggagccaggccctgtattcccaagtcattcggctactcctcagtggtgtgtgtatgcaatgccacctattgtgacagtttcgatcctccaactctccctgctctgggtaccttctcccggtatgagagcacaagaagtggaagacgcatggagctctcaatgggccctatacaggctaaccacactgggacaggtctgctgctgaccctccaacctgaacagaagtttcagaaagtcaagggatttggaggagccatgactgatgcagcagcactcaacatcttggccctgtctccaccagcccagaatctgctgttgaagtcctacttctcagaggaggggattggctacaacatcatccgggttcccatggctagctgtgacttctccattaggacctatacatacgctgacacccccgatgattttcagctccataatttcagtctccctgaagaagacaccaaactgaagatacctctgattcacagagccttgcaactgtcccaaaggccagtgagcctcttcgcttctccctggactagtcctacatggctgaagactaatggtgctgttaatgggaaaggctccctgaaaggacagccaggtgacatatatcatcagacatgggcccgctactttgtgaaattccttgatgcctatgcagagcacaagctccaattctgggcagtcaccgcagaaaacgagccctcagctgggctgctgtctggctacccctttcagtgcttgggctttactcctgagcatcaacgggacttcattgcccgggatttggggccaacactggccaacagcacccaccacaatgtaagactcctcatgctggatgaccagaggctgctgctccctcattgggccaaggtggtgttgacagacccagaagctgccaaatatgttcatggcatcgctgtccactggtacctggattttttggcccctgcaaaggctactctgggagagacccacagactcttccccaataccatgctgtttgcatcagaagcctgcgtggggagcaaattctgggagcagtctgttaggctgggttcctgggatcggggcatgcaatattcccatagtataataactaacctcctctaccacgtggtaggatggacagactggaatctggctttgaacccagaaggaggccccaattgggtgcgcaactttgttgacagccccatcattgtggatatcacaaaggacaccttctacaaacagcctatgttctatcatctggggcactttagcaagttcattccagagggttcccagagagtagatttggttgcctcacagaagaatgatctggatgctgtggcactcctgcatcctgacgggagtgcagtggtggtagtactgaacaggtctagcaaagatgttcccttgactatcaaagacccagctgtgggctttctggaaaccatttcccctggatactctatccacacctatctctggagaagacagtaatga

SEQ ID NO: 524 - protein, 536 aa, synthetic construct
  REGION 1..536: note = Variant of B-Glucocerebrosidase
MEFSSPSREECPKPLSRVSIMAGSLTGLLLLQAVSWASGARPCIPKSFGYSSVVCVCNATYCDSFDPPTLPALGTFSRYESTRSGRRMELSMGPIQANHTGTGLLLTLQPEQKFQKVKGFGGAMTDAAALNILALSPPAQNLLLKSYFSEEGIGYNIIRVPMASCDFSIRTYTYADTPDDFQLHNFSLPEEDTKLKIPLIHRALQLSQRPVSLFASPWTSPTWLKTNGAVNGKGSLKGQPGDIYHQTWARYFVKFLDAYAEHKLQFWAVTAENEPSAGLLSGYPFQCLGFTPEHQRDFIARDLGPTLANSTHHNVRLLMLDDQRLLLPHWAKVVLTDPEAAKYVHGIAVHWYLDFLAPAKATLGETHRLFPNTMLFASEACVGSKFWEQSVRLGSWDRGMQYSHSIITNLLYHVVGWTDWNLALNPEGGPNWVRNFVDSPIIVDITKDTFYKQPMFYHLGHFSKFIPEGSQRVDLVASQKNDLDAVALLHPDGSAVVVVLNRSSKDVPLTIKDPAVGFLETISPGYSIHTYLWRRQ

SEQ ID NO: 525 - DNA, 1614 bp, synthetic construct
  misc_feature 1..1614: note = Variant of B-Glucocerebrosidase
  source 1..1614: mol_type = other DNA
atggagttttcttctcctagtagagaagaatgccccaagccactgagcagggtgagcatcatggctggatccctcacagggctgcttcttttgcaggcagtctcatgggcctctggagccaggccctgtattcccaagtcattcggctactcctcagtggtgtgtgtatgcaatgccacctattgtgacagtttcgatcctccaactctccctgctctgggtaccttctcccggtatgagagcacaagaagtggaagacgcatggagctctcaatgggccctatacaggctaaccacactagtacaggtctgctgctgaccctccaacctgaacagaagtttcagaaagtcaagggatttggaggagccatgactgatgcagcagcactcaacatcttggccctgtctccaccagcccagaatctgctgttgaagtcctacttctcagaggaggggattggctacaacatcatccgggttcccatggctagctgtgacttctccattaggacctatacatacgctgacacccccgatgattttcagctccataatttcagtctccctgaagaagacaccaaactgaagatacctctgattcacagagccttgcaactgtcccaaaggccagtgagcctcttcgcttctccctggactagtcctacatggctgaagactaatggtgctgttaatgggaaaggctccctgaaaggacagccaggtgacatatatcatcagacatgggcccgctactttgtgaaattccttgatgcctatgcagagcacaagctccaattctgggcagtcaccgcagaaaacgagccctcagctgggctgctgtctggctacccctttcagtgcttgggctttactcctgagcatcaacgggacttcattgcccgggatttggggccaacactggccaacagcacccaccacaatgtaagactcctcatgctggatgaccagaggctgctgctccctcattgggccaaggtggtgttgacagacccagaagctgccaaatatgttcatggcatcgctgtccactggtacctggattttttggcccctgcaaaggctactctgggagagacccacagactcttccccaataccatgctgtttgcatcagaagcctgcgtggggagcaaattctgggagcagtctgttaggctgggttcctgggatcggggcatgcaatattcccatagtataataactaacctcctctaccacgtggtaggatggacagactggaatctggctttgaacccagaaggaggccccaattgggtgcgcaactttgttgacagccccatcattgtggatatcacaaaggacaccttctacaaacagcctatgttctatcatctggggcactttagcaagttcattccagagggttcccagagagtaggcttggttgcctcacagaagaatgatctggatgctgtggcactcctgcatcctgacgggagtgcagtggtggtagtactgaacaggtctagcaaagatgttcccttgactatcaaagacccagctgtgggctttctggaaaccatttcccctggatactctatccacacctatctctggagaagacagtaatga

SEQ ID NO: 526 - protein, 536 aa, synthetic construct
  REGION 1..536: note = Variant of B-Glucocerebrosidase
MEFSSPSREECPKPLSRVSIMAGSLTGLLLLQAVSWASGARPCIPKSFGYSSVVCVCNATYCDSFDPPTLPALGTFSRYESTRSGRRMELSMGPIQANHTSTGLLLTLQPEQKFQKVKGFGGAMTDAAALNILALSPPAQNLLLKSYFSEEGIGYNIIRVPMASCDFSIRTYTYADTPDDFQLHNFSLPEEDTKLKIPLIHRALQLSQRPVSLFASPWTSPTWLKTNGAVNGKGSLKGQPGDIYHQTWARYFVKFLDAYAEHKLQFWAVTAENEPSAGLLSGYPFQCLGFTPEHQRDFIARDLGPTLANSTHHNVRLLMLDDQRLLLPHWAKVVLTDPEAAKYVHGIAVHWYLDFLAPAKATLGETHRLFPNTMLFASEACVGSKFWEQSVRLGSWDRGMQYSHSIITNLLYHVVGWTDWNLALNPEGGPNWVRNFVDSPIIVDITKDTFYKQPMFYHLGHFSKFIPEGSQRVGLVASQKNDLDAVALLHPDGSAVVVVLNRSSKDVPLTIKDPAVGFLETISPGYSIHTYLWRRQ

SEQ ID NO: 527 - DNA, 1614 bp, synthetic construct
  misc_feature 1..1614: note = Variant of B-Glucocerebrosidase
  source 1..1614: mol_type = other DNA
atggagttttcttctcctagtagagaagaatgccccaagccactgagcagggtgagcatcatggctggatccctcacagggctgcttcttttgcaggcagtctcatgggcctctggagccaggccctgtattcccaagtcattcggctactcctcagtggtgtgtgtatgcaatgccacctattgtgacagtttcgatcctccaactctccctgctctgggtaccttctcccggtatgagagcacaagaagtggaagacgcatggagctctcaatgggccctatacaggctaaccacactgggacaggtctgctgtggaccctccaacctgaacagaagtttcagaaagtcaagggatttggaggagccatgactgatgcagcagcactcaacatcttggccctgtctccaccagcccagaatctgctgttgaagtcctacttctcagaggaggggattggctacaacatcatccgggttcccatggctagctgtgacttctccattaggacctatacatacgctgacacccccgatgattttcagctccataatttcagtctccctgaagaagacaccaaactgaagatacctctgattcacagagccttgcaactgtcccaaaggccagtgagcctcttcgcttctccctggactagtcctacatggctgaagactaatggtgctgttaatgggaaaggctccctgaaaggacagccaggtgacatatatcatcagacatgggcccgctactttgtgaaattccttgatgcctatgcagagcacaagctccaattctgggcagtcaccgcagaaaacgagccctcagctgggctgctgtctggctacccctttcagtgcttgggctttactcctgagcatcaacgggacttcattgcccgggatttggggccaacactggccaacagcacccaccacaatgtaagactcctcatgctggatgaccagaggctgctgctccctcattgggccaaggtggtgttgacagacccagaagctgccaaatatgttcatggcatcgctgtccactggtacctggattttttggcccctgcaaaggctactctgggagagacccacagactcttccccaataccatgctgtttgcatcagaagcctgcgtggggagcaaattctgggagcagtctgttaggctgggttcctgggatcggggcatgcaatattcccatagtataataactaacctcctctaccacgtggtaggatggacagactggaatctggctttgaacccagaaggaggccccaattgggtgcgcaactttgttgacagccccatcattgtggatatcacaaaggacaccttctacaaacagcctatgttctatcatctggggcactttagcaagttcattccagagggttcccagagagtaggcttggttgcctcacagaagaatgatctggatgctgtggcactcctgcatcctgacgggagtgcagtggtggtagtactgaacaggtctagcaaagatgttcccttgactatcaaagacccagctgtgggctttctggaaaccatttcccctggatactctatccacacctatctctggagaagacagtaatga

SEQ ID NO: 528 - protein, 536 aa, synthetic construct
  REGION 1..536: note = Variant of B-Glucocerebrosidase
MEFSSPSREECPKPLSRVSIMAGSLTGLLLLQAVSWASGARPCIPKSFGYSSVVCVCNATYCDSFDPPTLPALGTFSRYESTRSGRRMELSMGPIQANHTGTGLLWTLQPEQKFQKVKGFGGAMTDAAALNILALSPPAQNLLLKSYFSEEGIGYNIIRVPMASCDFSIRTYTYADTPDDFQLHNFSLPEEDTKLKIPLIHRALQLSQRPVSLFASPWTSPTWLKTNGAVNGKGSLKGQPGDIYHQTWARYFVKFLDAYAEHKLQFWAVTAENEPSAGLLSGYPFQCLGFTPEHQRDFIARDLGPTLANSTHHNVRLLMLDDQRLLLPHWAKVVLTDPEAAKYVHGIAVHWYLDFLAPAKATLGETHRLFPNTMLFASEACVGSKFWEQSVRLGSWDRGMQYSHSIITNLLYHVVGWTDWNLALNPEGGPNWVRNFVDSPIIVDITKDTFYKQPMFYHLGHFSKFIPEGSQRVGLVASQKNDLDAVALLHPDGSAVVVVLNRSSKDVPLTIKDPAVGFLETISPGYSIHTYLWRRQ

SEQ ID NO: 529 - DNA, 1614 bp, synthetic construct
  misc_feature 1..1614: note = Variant of B-Glucocerebrosidase
  source 1..1614: mol_type = other DNA
atggagttttcttctcctagtagagaagaatgccccaagccactgagcagggtgagcatcatggctggatccctcacagggctgcttcttttgcaggcagtctcatgggcctctggagccaggccctgtattcccaagtcattcggctactcctcagtggtgtgtgtatgcaatgccacctattgtgacagtttcgatcctccaactctccctgctctgggtaccttctcccggtatgagagcacaagaagtggaagacgcatggagctctcaatgggccctatacaggctaaccacactgggacaggtctgctgctgaccctccaacctgaacagaagtttcagaaagtcaagggatttggaggagccatgactgatgcagcagcactcaacatcttggccctgtctccaccagcccagaatctgctgttgaagtcctacttctcagaggaggggattggctacaacatcatccgggttcccatggctagctgtgacttctccattaggacctatacatacgctgacacccccgatgattttcagctccataatttcagtctccctgaagaagacaccaaactgaagatacctctgattcacagagccttgcaactgtcccaaaggccagtgagcctcttcgcttctccctggactagtcctacatggctgaagactaatggtgctgttaatgggaaaggctccctgaaaggacagccaggtgacatatatcatcagacatgggcccgctactttgtgaaattccttgatgcctatgcagagcacaagctccaattctgggcagtcaccgcagaaaacgagccctcagctgggctgctgtctggctacccctttcagtgcttgggctttactcctgagcatcaacgggacttcattgcccgggatttggggccaacactggccaacagcacccaccacaatgtaagactcctcatgctggatgaccagaggctgctgctccctcattgggccaaggtggtgttgacagacccagaagctgccaaatatgttcatggcatcgctgtccactggtacctggattttttggcccctgcaaaggctactctgggagagacccacagactcttccccaataccatgctgtttgcatcagaagcctgcgtggggagcaaattatgggagcagtctgttaggctgggttcctgggatcggggcatgcaatattcccatagtataataactaacctcctctaccacgtggtaggatggacagactggaatctggctttgaacccagaaggaggccccaattgggtgcgcaactttgttgacagccccatcattgtggatatcacaaaggacaccttctacaaacagcctatgttctatcatctggggcactttagcaagttcattccagagggttcccagagagtaggcttggttgcctcacagaagaatgatctggatgctgtggcactcctgcatcctgacgggagtgcagtggtggtagtactgaacaggtctagcaaagatatgcccttgactatcaaagacccagctgtgggctttctggaaaccatttcccctggatactctatccacacctatctctggagaagacagtaatga

SEQ ID NO: 530 - protein, 536 aa, synthetic construct
  REGION 1..536: note = Variant of B-Glucocerebrosidase
MEFSSPSREECPKPLSRVSIMAGSLTGLLLLQAVSWASGARPCIPKSFGYSSVVCVCNATYCDSFDPPTLPALGTFSRYESTRSGRRMELSMGPIQANHTGTGLLLTLQPEQKFQKVKGFGGAMTDAAALNILALSPPAQNLLLKSYFSEEGIGYNIIRVPMASCDFSIRTYTYADTPDDFQLHNFSLPEEDTKLKIPLIHRALQLSQRPVSLFASPWTSPTWLKTNGAVNGKGSLKGQPGDIYHQTWARYFVKFLDAYAEHKLQFWAVTAENEPSAGLLSGYPFQCLGFTPEHQRDFIARDLGPTLANSTHHNVRLLMLDDQRLLLPHWAKVVLTDPEAAKYVHGIAVHWYLDFLAPAKATLGETHRLFPNTMLFASEACVGSKLWEQSVRLGSWDRGMQYSHSIITNLLYHVVGWTDWNLALNPEGGPNWVRNFVDSPIIVDITKDTFYKQPMFYHLGHFSKFIPEGSQRVGLVASQKNDLDAVALLHPDGSAVVVVLNRSSKDMPLTIKDPAVGFLETISPGYSIHTYLWRRQ

SEQ ID NO: 531 - DNA, 1614 bp, synthetic construct
  misc_feature 1..1614: note = Variant of B-Glucocerebrosidase
  source 1..1614: mol_type = other DNA
atggagttttcttctcctagtagagaagaatgccccaagccactgagcagggtgagcatcatggctggatccctcacagggctgcttcttttgcaggcagtctcatgggcctctggagccaggccctgtattcccaagtcattcggctactcctcagtggtgtgtgtatgcaatgccacctattgtgacagtttcgatcctccaactctccctgctctgggtaccttctcccggtatgagagcacaagaagtggaagacgcatggagctctcaatgggccctatacaggctaaccacactgggacaggtctgctgctgaccctccaacctgaacagaagtttcagaaagtcaagggatttggaggagccatgactgatgcagcagcactcaacatcttggccctgtctccaccagcccagaatctgctgttgaagtcctacttctcagaggaggggattggctacaacatcatccgggttcccatggctagctgtgacttctccattaggacctatacatacgctgacacccccgatgattttcagctccataatttcagtctccctgaagaagacaccaaactgaagatacctctgattcacagagccttgcaactgtcccaaaggccagtgagcctcttcgcttctccctggactagtcctacatggctgaagactaatggtgctgttaatgggaaaggctccctgaaaggacagccaggtgacatatatcatcagacatgggcccgctactttgtgaaattccttgatgcctatgcagagcacaagctccaattctgggcagtcaccgcagaaaacgagccctcagctgggctgctgtctggctacccctttcagtgcttgggctttactcctgagcatcaacgggacttcattgcccgggatttggggccaacactggccaacagcacccaccacaatgtaagactcctcatgctggatgaccagaggctgctgctccctcattgggccaaggtggtgttgacagacccagaagctgccaaatatgttcatggcatcgctgtccactggtacctggattttttggcccctgcaaaggctactctgggagagacccacagactcttccccaataccatgctgtttgcatcagaagcctgcgtggggagcaaattctgggagcagtctgttaggctgggttcctgggatcggggcatgcaatattcccatagtataataactaacctcctctaccacgtggtaggatggacagactggaatctggctttgaacccagaaggaggccccaattgggtgcgcaactttgttgacagccccatcattgtggatatcacaaaggacaccttctacaaacagcctatgttctatcatctggggcactttagcaagttcattccagagggttcctctagagtaggcttggttgcctcacagaagaatgatctggatgctgtggcactcctgcatcctgacgggagtgcagtggtggtagtactgaacaggtctagcaaagatgttcccttgactatcaaagacccagctgtgggctttctggaaaccatttcccctggatactctatccacacctatctctggagaagacagtaatga

SEQ ID NO: 532 - protein, 536 aa, synthetic construct
  REGION 1..536: note = Variant of B-Glucocerebrosidase
MEFSSPSREECPKPLSRVSIMAGSLTGLLLLQAVSWASGARPCIPKSFGYSSVVCVCNATYCDSFDPPTLPALGTFSRYESTRSGRRMELSMGPIQANHTGTGLLLTLQPEQKFQKVKGFGGAMTDAAALNILALSPPAQNLLLKSYFSEEGIGYNIIRVPMASCDFSIRTYTYADTPDDFQLHNFSLPEEDTKLKIPLIHRALQLSQRPVSLFASPWTSPTWLKTNGAVNGKGSLKGQPGDIYHQTWARYFVKFLDAYAEHKLQFWAVTAENEPSAGLLSGYPFQCLGFTPEHQRDFIARDLGPTLANSTHHNVRLLMLDDQRLLLPHWAKVVLTDPEAAKYVHGIAVHWYLDFLAPAKATLGETHRLFPNTMLFASEACVGSKFWEQSVRLGSWDRGMQYSHSIITNLLYHVVGWTDWNLALNPEGGPNWVRNFVDSPIIVDITKDTFYKQPMFYHLGHFSKFIPEGSSRVGLVASQKNDLDAVALLHPDGSAVVVVLNRSSKDVPLTIKDPAVGFLETISPGYSIHTYLWRRQ

SEQ ID NO: 533 - DNA, 1614 bp, synthetic construct
  misc_feature 1..1614: note = Variant of B-Glucocerebrosidase
  source 1..1614: mol_type = other DNA
atggagttttcttctcctagtagagaagaatgccccaagccactgagcagggtgagcatcatggctggatccctcacagggctgcttcttttgcaggcagtctcatgggcctctggagccaggccctgtattcccaagtcattcggctactcctcagtggtgtgtgtatgcaatgccacctattgtgacagtttcgatcctccaactctccctgctctgggtaccttctcccggtatgagagcacaagaagtggaagacgcatggagctctcaatgggccctatacaggctaaccacactgggacaggtctgctgctgcagctccaacctgaacagaagtttcagaaagtcaagggatttggaggagccatgactgatgcagcagcactcaacatcttggccctgtctccaccagcccagaatctgctgttgaagtcctacttctcagaggaggggattggctacaacatcatccgggttcccatggctagctgtgacttctccattaggacctatacatacgctgacacccccgatgattttcagctccataatttcagtctccctgaagaagacaccaaactgaagatacctctgattcacagagccttgcaactgtcccaaaggccagtgagcctcttcgcttctccctggactagtcctacatggctgaagactaatggtgctgttaatgggaaaggctccctgaaaggacagccaggtgacatatatcatcagacatgggcccgctactttgtgaaattccttgatgcctatgcagagcacaagctccaattctgggcagtcaccgcagaaaacgagccctcagctgggctgctgtctggctacccctttcagtgcttgggctttactcctgagcatcaacgggacttcattgcccgggatttggggccaacactggccaacagcacccaccacaatgtaagactcctcatgctggatgaccagaggctgctgctccctcattgggccaaggtggtgttgacagacccagaagctgccaaatatgttcatggcatcgctgtccactggtacctggattttttggcccctgcaaaggctactctgggagagacccacagactcttccccaataccatgctgtttgcatcagaagcctgcgtggggagcaaattctgggagcagtctgttaggctgggttcctgggatcggggcatgcaatattcccatagtataataactaacctcctctaccacgtggtaggatggacagactggaatctggctttgaacccagaaggaggccccaattgggtgcgcaactttgttgacagccccatcattgtggatatcacaaaggacaccttctacaaacagcctatgttctatcatctggggcactttagcaagttcattccagagggttcccagagagtaggcttggttgcctcacagaagaatgatctggatgctgtggcactcctgcatcctgacgggagtgcagtggtggtagtactgaacaggtctagcaaagatgttcccttgactatcaaagacccagctgtgggctttctggaaaccatttcccctggatactctatccacacctatctctggagaagacagtaatga

SEQ ID NO: 534 - protein, 536 aa, synthetic construct
  REGION 1..536: note = Variant of B-Glucocerebrosidase
MEFSSPSREECPKPLSRVSIMAGSLTGLLLLQAVSWASGARPCIPKSFGYSSVVCVCNATYCDSFDPPTLPALGTFSRYESTRSGRRMELSMGPIQANHTGTGLLLQLQPEQKFQKVKGFGGAMTDAAALNILALSPPAQNLLLKSYFSEEGIGYNIIRVPMASCDFSIRTYTYADTPDDFQLHNFSLPEEDTKLKIPLIHRALQLSQRPVSLFASPWTSPTWLKTNGAVNGKGSLKGQPGDIYHQTWARYFVKFLDAYAEHKLQFWAVTAENEPSAGLLSGYPFQCLGFTPEHQRDFIARDLGPTLANSTHHNVRLLMLDDQRLLLPHWAKVVLTDPEAAKYVHGIAVHWYLDFLAPAKATLGETHRLFPNTMLFASEACVGSKFWEQSVRLGSWDRGMQYSHSIITNLLYHVVGWTDWNLALNPEGGPNWVRNFVDSPIIVDITKDTFYKQPMFYHLGHFSKFIPEGSQRVGLVASQKNDLDAVALLHPDGSAVVVVLNRSSKDVPLTIKDPAVGFLETISPGYSIHTYLWRRQ

SEQ ID NO: 535 - DNA, 1614 bp, synthetic construct
  misc_feature 1..1614: note = Variant of B-Glucocerebrosidase
  source 1..1614: mol_type = other DNA
atggagttttcttctcctagtagagaagaatgccccaagccactgagcagggtgagcatcatggctggatccctcacagggctgcttcttttgcaggcagtctcatgggcctctggagccaggccctgtattcccaagtcattcggctactcctcagtggtgtgtgtatgcaatgccacctattgtgacagtttcgatcctcagactctccctgctctgggtaccttctcccggtatgagagcacaagaagtggaagacgcatggagctctcaatgggccctatacaggctaaccacactgggacaggtctgctgctgaccctccaacctgaacagaagtttcagaaagtcaagggatttggaggagccatgactgatgcagcagcactcaacatcttggccctgtctccaccagcccagaatctgctgttgaagtcctacttctcagaggaggggattggctacaacatcatccgggttcccatggctagctgtgacttctccattaggacctatacatacgctgacacccccgatgattttcagctccataatttcagtctccctgaagaagacaccaaactgaagatacctctgattcacagagccttgcaactgtcccaaaggccagtgagcctcttcgcttctccctggactagtcctacatggctgaagactaatggtgctgttaatgggaaaggctccctgaaaggacagccaggtgacatatatcatcagacatgggcccgctactttgtgaaattccttgatgcctatgcagagcacaagctccaattctgggcagtcaccgcagaaaacgagccctcagctgggctgctgtctggctacccctttcagtgcttgggctttactcctgagcatcaacgggacttcattgcccgggatttggggccaacactggccaacagcacccaccacaatgtaagactcctcatgctggatgaccagaggctgctgctccctcattgggccaaggtggtgttgacagacccagaagctgccaaatatgttcatggcatcgctgtccactggtacctggattttttggcccctgcaaaggctactctgggagagacccacagactcttccccaataccatgctgtttgcatcagaagcctgcgtggggagcaaattctgggagcagtctgttaggctgggttcctgggatcggggcatgcaatattcccatagtataataactaacctcctctaccacgtggtaggatggacagactggaatctggctttgaacccagaaggaggccccaattgggtgcgcaactttgttgacagccccatcattgtggatatcacaaaggacaccttctacaaacagcctatgttctatcatctggggcactttagcaagttcattccagagggttcccagagagtaggcttggttgcctcacagaagaatgatctggatgctgtggcactcctgcatcctgacgggagtgcagtggtggtagtactgaacaggtctagcaaagatgttcccttgactatcaaagacccagctgtgggctttctggaaaccatttcccctggatactctatccacacctatctctggagaagacagtaatga

SEQ ID NO: 536 - protein, 536 aa, synthetic construct
  REGION 1..536: note = Variant of B-Glucocerebrosidase
MEFSSPSREECPKPLSRVSIMAGSLTGLLLLQAVSWASGARPCIPKSFGYSSVVCVCNATYCDSFDPQTLPALGTFSRYESTRSGRRMELSMGPIQANHTGTGLLLTLQPEQKFQKVKGFGGAMTDAAALNILALSPPAQNLLLKSYFSEEGIGYNIIRVPMASCDFSIRTYTYADTPDDFQLHNFSLPEEDTKLKIPLIHRALQLSQRPVSLFASPWTSPTWLKTNGAVNGKGSLKGQPGDIYHQTWARYFVKFLDAYAEHKLQFWAVTAENEPSAGLLSGYPFQCLGFTPEHQRDFIARDLGPTLANSTHHNVRLLMLDDQRLLLPHWAKVVLTDPEAAKYVHGIAVHWYLDFLAPAKATLGETHRLFPNTMLFASEACVGSKFWEQSVRLGSWDRGMQYSHSIITNLLYHVVGWTDWNLALNPEGGPNWVRNFVDSPIIVDITKDTFYKQPMFYHLGHFSKFIPEGSQRVGLVASQKNDLDAVALLHPDGSAVVVVLNRSSKDVPLTIKDPAVGFLETISPGYSIHTYLWRRQ

SEQ ID NO: 537 - DNA, 1614 bp, synthetic construct
  misc_feature 1..1614: note = Variant of B-Glucocerebrosidase
  source 1..1614: mol_type = other DNA
atggagttttcttctcctagtagagaagaatgccccaagccactgagcagggtgagcatcatggctggatccctcacagggctgcttcttttgcaggcagtctcatgggcctctggagccaggccctgtattcccaagtcattcggctactcctcagtggtgtgtgtatgcaatgccacctattgtgacagtttcgatcctccaactctccctgctctgggtaccttctcccggattgagagcacaagaagtggaagacgcatggagctctcaatgggccctatacaggctaaccacactgggacaggtctgctgctgaccctccaacctgaacagaagtttcagaaagtcaagggatttggaggagccatgactgatgcagcagcactcaacatcttggccctgtctccaccagcccagaatctgctgttgaagtcctacttctcagaggaggggattggctacaacatcatccgggttcccatggctagctgtgacttctccattaggacctatacatacgctgacacccccgatgattttcagctccataatttcagtctccctgaagaagacaccaaactgaagatacctctgattcacagagccttgcaactgtcccaaaggccagtgagcctcttcgcttctccctggactagtcctacatggctgaagactaatggtgctgttaatgggaaaggctccctgaaaggacagccaggtgacatatatcatcagacatgggcccgctactttgtgaaattccttgatgcctatgcagagcacaagctccaattctgggcagtcaccgcagaaaacgagccctcagctgggctgctgtctggctacccctttcagtgcttgggctttactcctgagcatcaacgggacttcattgcccgggatttggggccaacactggccaacagcacccaccacaatgtaagactcctcatgctggatgaccagaggctgctgctccctcattgggccaaggtggtgttgacagacccagaagctgccaaatatgttcatggcatcgctgtccactggtacctggattttttggcccctgcaaaggctactctgggagagacccacagactcttccccaataccatgctgtttgcatcagaagcctgcgtggggagcaaattctgggagcagtctgttaggctgggttcctgggatcggggcatgcaatattcccatagtataataactaacctcctctaccacgtggtaggatggacagactggaatctggctttgaacccagaaggaggccccaattgggtgcgcaactttgttgacagccccatcattgtggatatcacaaaggacaccttctacaaacagcctatgttctatcatctggggcactttagcaagttcattccagagggttcccagagagtaggcttggttgcctcacagaagaatgatctggatgctgtggcactcctgcatcctgacgggagtgcagtggtggtagtactgaacaggtctagcaaagatgttcccttgactatcaaagacccagctgtgggctttctggaaaccatttcccctggatactctatccacacctatctctggagaagacagtaatga

SEQ ID NO: 538 - protein, 536 aa, synthetic construct
  REGION 1..536: note = Variant of B-Glucocerebrosidase
MEFSSPSREECPKPLSRVSIMAGSLTGLLLLQAVSWASGARPCIPKSFGYSSVVCVCNATYCDSFDPPTLPALGTFSRIESTRSGRRMELSMGPIQANHTGTGLLLTLQPEQKFQKVKGFGGAMTDAAALNILALSPPAQNLLLKSYFSEEGIGYNIIRVPMASCDFSIRTYTYADTPDDFQLHNFSLPEEDTKLKIPLIHRALQLSQRPVSLFASPWTSPTWLKTNGAVNGKGSLKGQPGDIYHQTWARYFVKFLDAYAEHKLQFWAVTAENEPSAGLLSGYPFQCLGFTPEHQRDFIARDLGPTLANSTHHNVRLLMLDDQRLLLPHWAKVVLTDPEAAKYVHGIAVHWYLDFLAPAKATLGETHRLFPNTMLFASEACVGSKFWEQSVRLGSWDRGMQYSHSIITNLLYHVVGWTDWNLALNPEGGPNWVRNFVDSPIIVDITKDTFYKQPMFYHLGHFSKFIPEGSQRVGLVASQKNDLDAVALLHPDGSAVVVVLNRSSKDVPLTIKDPAVGFLETISPGYSIHTYLWRRQ

SEQ ID NO: 539 - DNA, 1614 bp, synthetic construct
  misc_feature 1..1614: note = Variant of B-Glucocerebrosidase
  source 1..1614: mol_type = other DNA
atggagttttcttctcctagtagagaagaatgccccaagccactgagcagggtgagcatcatggctggatccctcacagggctgcttcttttgcaggcagtctcatgggcctctggagccaggccctgtattcccaagtcattcggctactcctcagtggtgtgtgtatgcaatgccacctattgtgacagtttcgatcctccaactctccctgctctgggtaccttctcccggtatgagagcacaagaagtggaagacgcatggagctctcaatgggccctatacaggctaaccacactgggacaggtctgctgctgaccctccaacctgaacagaagtttcagaaagtcaagggatttggaggagccatgactgatgcagcagcactcaacatcttggccctgtctccaccagcccagaatctgctgttgaagtcctacttctcagaggaggggattggctacaacatcatccgggttcccatggctagctgtgacttctccattaggacctatacatacgctgacacccccgatgattttcagctccataatttcagtctccctgaagaagacaccaaactgaagatacctctgattcacagagccttgcaactgtcccaaaggccagtgagcctcttcgcttctccctggactagtcctacatggctgaagactaatggtgctgttaatgggaaaggctccctgaaaggacagccaggtgacatatatcatcagacatgggcccgctactttgtgaaattccttgatgcctatgcagagcacaagctccaattctgggcagtcaccgcagaaaacgagccctcagctgggctgctgtctggctacccctttcagtgcttgggctttactcctgagcatcaacgggacttcattgcccgggatttggggccaacactggccaacagcacccaccacaatgtaagactcctcatgctggatgaccagaggctgctgctccctcattgggccaaggtggtgttgacagacccagaagctgccaaatatgttcatggcatcgctgtccactggtacctggattttttggcccctgcaaaggctactctgggagagacccacagactcttccccaataccatgctgtttgcatcagaagcctgcgtggggagcaaattctgggagcagtctgttaggctgggttcctgggatcggggcatgcaatattcccatagtataataactaacctcctctaccacgtggtaggatggacagactggaatctggctttgaacccagaaggaggccccaattgggtgcgcaactttgttgacagccccatcattgtggatatcacaaaggacaccttctacaaacagcctatgttctatcatctggggcactttagcaagttcattccagagggttcccagagagtaggcttggttgcctcacagaagaatgatctggatgctgtggcactcctgcatcctgacgggagtgcagtggtggtagtactgaacaggtctagcaaagatgttcccttgactatcaaagacccagctgtgggcttgctggaaaccatttcccctggatactctatccacacctatctctggagaagacagtaatga

SEQ ID NO: 540 - protein, 536 aa, synthetic construct
  REGION 1..536: note = Variant of B-Glucocerebrosidase
MEFSSPSREECPKPLSRVSIMAGSLTGLLLLQAVSWASGARPCIPKSFGYSSVVCVCNATYCDSFDPPTLPALGTFSRYESTRSGRRMELSMGPIQANHTGTGLLLTLQPEQKFQKVKGFGGAMTDAAALNILALSPPAQNLLLKSYFSEEGIGYNIIRVPMASCDFSIRTYTYADTPDDFQLHNFSLPEEDTKLKIPLIHRALQLSQRPVSLFASPWTSPTWLKTNGAVNGKGSLKGQPGDIYHQTWARYFVKFLDAYAEHKLQFWAVTAENEPSAGLLSGYPFQCLGFTPEHQRDFIARDLGPTLANSTHHNVRLLMLDDQRLLLPHWAKVVLTDPEAAKYVHGIAVHWYLDFLAPAKATLGETHRLFPNTMLFASEACVGSKFWEQSVRLGSWDRGMQYSHSIITNLLYHVVGWTDWNLALNPEGGPNWVRNFVDSPIIVDITKDTFYKQPMFYHLGHFSKFIPEGSQRVGLVASQKNDLDAVALLHPDGSAVVVVLNRSSKDVPLTIKDPAVGLLETISPGYSIHTYLWRRQ

SEQ ID NO: 541 - DNA, 1614 bp, synthetic construct
  misc_feature 1..1614: note = Variant of B-Glucocerebrosidase
  source 1..1614: mol_type = other DNA
atggagttttcttctcctagtagagaagaatgccccaagccactgagcagggtgagcatcatggctggatccctcacagggctgcttcttttgcaggcagtctcatgggcctctggagccaggccctgtattcccaagtcattcggctactcctcagtggtgtgtgtatgcaatgccacctattgtgacagtttcgatcctccaactctccctgctctgggtaccttctcccggtatgagagcacaagaagtggaagacgcatggagctctcaatgggccctatacaggctaaccacactgggacaggtctgctgctgaccctccaacctgaacagaagtttcagaaagtcaagggatttggaggagccatgactgatgcagcagcactcaacatcttggccctgtctccaccagcccagaatctgctgttgaagtcctacttctcagaggaggggattggctacaacatcatccgggttcccatggctagctgtgacttctccattaggacctatacatacgctgacacccccgatgattttcagctccataatttcagtctccctgaagaagacaccaaactgaagatacctctgattcacagagccttgcaactgtcccaaaggccagtgagcctcttcgcttctccctggactagtcctacatggctgaagactaatggtgctgttaatgggaaaggctccctgaaaggacagccaggtgacatatatcatcagacatgggcccgctactttgtgaaattccttgatgcctatgcagagcacaagctccaattctgggcagtcaccgcagaaaacgagccctcagctgggctgctgtctggctacccctttcagtgcttgggctttactcctgagcatcaacgggacttcattgcccgggatttggggccaacactggccaacagcacccaccacaatgtaagactcctcatgctggatgaccagaggctgctgctccctcattgggccaaggtggtgttgacagacccagaagctgccaaatatgttcatggcatcgctgtccactggtacctggattttttggcccctgcaaaggctactctgggagagacccacagactcttccccaataccatgctgtttgcatcagaagcctgcgtggggagcaaattctgggagcagtctgttaggctgggttcctgggatcggggcatgcaatattcccatagtataataactaacctcctctaccacgtggtaggatggacagactggaatctggctttgaacccagaaggaggccccaattgggtgcgcaactttgttgacagccccatcattgtggatatcacaaaggacaccttctacaaacagcctatgttctatcatctggggcactttagcaagttcattccagagggttcccagagagtagcgttggttgcctcacagaagaatgatctggatgctgtggcactcctgcatcctgacgggagtgcagtggtggtagtactgaacaggtctagcaaagatgttcccttgactatcaaagacccagctgtgggctttctggaaaccatttcccctggatactctatccacacctatctctggagaagacagtaatga

SEQ ID NO: 542 - protein, 536 aa, synthetic construct
  REGION 1..536: note = Variant of B-Glucocerebrosidase
MEFSSPSREECPKPLSRVSIMAGSLTGLLLLQAVSWASGARPCIPKSFGYSSVVCVCNATYCDSFDPPTLPALGTFSRYESTRSGRRMELSMGPIQANHTGTGLLLTLQPEQKFQKVKGFGGAMTDAAALNILALSPPAQNLLLKSYFSEEGIGYNIIRVPMASCDFSIRTYTYADTPDDFQLHNFSLPEEDTKLKIPLIHRALQLSQRPVSLFASPWTSPTWLKTNGAVNGKGSLKGQPGDIYHQTWARYFVKFLDAYAEHKLQFWAVTAENEPSAGLLSGYPFQCLGFTPEHQRDFIARDLGPTLANSTHHNVRLLMLDDQRLLLPHWAKVVLTDPEAAKYVHGIAVHWYLDFLAPAKATLGETHRLFPNTMLFASEACVGSKFWEQSVRLGSWDRGMQYSHSIITNLLYHVVGWTDWNLALNPEGGPNWVRNFVDSPIIVDITKDTFYKQPMFYHLGHFSKFIPEGSQRVALVASQKNDLDAVALLHPDGSAVVVVLNRSSKDVPLTIKDPAVGFLETISPGYSIHTYLWRRQ

SEQ ID NO: 543 - DNA, 1614 bp, synthetic construct
  misc_feature 1..1614: note = Variant of B-Glucocerebrosidase
  source 1..1614: mol_type = other DNA
atggagttttcttctcctagtagagaagaatgccccaagccactgagcagggtgagcatcatggctggatccctcacagggctgcttcttttgcaggcagtctcatgggcctctggagccaggccctgtattcccaagtcattcggctactcctcagtggtgtgtgtatgcaatgccacctattgtgacagtttcgatcctccaactctccctgctctgggtaccttctcccggtatgagagcacaagaagtggaagacgcatggagctctcaatgggccctatacaggctaaccacactgggacaggtctgctgctgtcgctccaacctgaacagaagtttcagaaagtcaagggatttggaggagccatgactgatgcagcagcactcaacatcttggccctgtctccaccagcccagaatctgctgttgaagtcctacttctcagaggaggggattggctacaacatcatccgggttcccatggctagctgtgacttctccattaggacctatacatacgctgacacccccgatgattttcagctccataatttcagtctccctgaagaagacaccaaactgaagatacctctgattcacagagccttgcaactgtcccaaaggccagtgagcctcttcgcttctccctggactagtcctacatggctgaagactaatggtgctgttaatgggaaaggctccctgaaaggacagccaggtgacatatatcatcagacatgggcccgctactttgtgaaattccttgatgcctatgcagagcacaagctccaattctgggcagtcaccgcagaaaacgagccctcagctgggctgctgtctggctacccctttcagtgcttgggctttactcctgagcatcaacgggacttcattgcccgggatttggggccaacactggccaacagcacccaccacaatgtaagactcctcatgctggatgaccagaggctgctgctccctcattgggccaaggtggtgttgacagacccagaagctgccaaatatgttcatggcatcgctgtccactggtacctggattttttggcccctgcaaaggctactctgggagagacccacagactcttccccaataccatgctgtttgcatcagaagcctgcgtggggagcaaattctgggagcagtctgttaggctgggttcctgggatcggggcatgcaatattcccatagtataataactaacctcctctaccacgtggtaggatggacagactggaatctggctttgaacccagaaggaggccccaattgggtgcgcaactttgttgacagccccatcattgtggatatcacaaaggacaccttctacaaacagcctatgttctatcatctggggcactttagcaagttcattccagagggttcccagagagtaggcttggttgcctcacagaagaatgatctggatgctgtggcactcctgcatcctgacgggagtgcagtggtggtagtactgaacaggtctagcaaagatgttcccttgactatcaaagacccagctgtgggctttctggaaaccatttcccctggatactctatccacacctatctctggagaagacagtaatga

SEQ ID NO: 544 - protein, 536 aa, synthetic construct
  REGION 1..536: note = Variant of B-Glucocerebrosidase
MEFSSPSREECPKPLSRVSIMAGSLTGLLLLQAVSWASGARPCIPKSFGYSSVVCVCNATYCDSFDPPTLPALGTFSRYESTRSGRRMELSMGPIQANHTGTGLLLSLQPEQKFQKVKGFGGAMTDAAALNILALSPPAQNLLLKSYFSEEGIGYNIIRVPMASCDFSIRTYTYADTPDDFQLHNFSLPEEDTKLKIPLIHRALQLSQRPVSLFASPWTSPTWLKTNGAVNGKGSLKGQPGDIYHQTWARYFVKFLDAYAEHKLQFWAVTAENEPSAGLLSGYPFQCLGFTPEHQRDFIARDLGPTLANSTHHNVRLLMLDDQRLLLPHWAKVVLTDPEAAKYVHGIAVHWYLDFLAPAKATLGETHRLFPNTMLFASEACVGSKFWEQSVRLGSWDRGMQYSHSIITNLLYHVVGWTDWNLALNPEGGPNWVRNFVDSPIIVDITKDTFYKQPMFYHLGHFSKFIPEGSQRVGLVASQKNDLDAVALLHPDGSAVVVVLNRSSKDVPLTIKDPAVGFLETISPGYSIHTYLWRRQ

SEQ ID NO: 545 - DNA, 1614 bp, synthetic construct
  misc_feature 1..1614: note = Variant of B-Glucocerebrosidase
  source 1..1614: mol_type = other DNA
atggagttttcttctcctagtagagaagaatgccccaagccactgagcagggtgagcatcatggctggatccctcacagggctgcttcttttgcaggcagtctcatgggcctctggagccaggccctgtattcccaagtcattcggctactcctcagtggtgtgtgtatgcaatgccacctattgtgacagtttcgatcctccaactctccctgctctgggtaccttctcccggtatgagagcacaagaagtggaagacgcatggagctctcaatgggccctatacaggctaaccacactgggacaggtctgctgctgaccctccaacctgaacagaagtttcagaaaacgaagggatttggaggagccatgactgatgcagcagcactcaacatcttggccctgtctccaccagcccagaatctgctgttgaagtcctacttctcagaggaggggattggctacaacatcatccgggttcccatggctagctgtgacttctccattaggacctatacatacgctgacacccccgatgattttcagctccataatttcagtctccctgaagaagacaccaaactgaagatacctctgattcacagagccttgcaactgtcccaaaggccagtgagcctcttcgcttctccctggactagtcctacatggctgaagactaatggtgctgttaatgggaaaggctccctgaaaggacagccaggtgacatatatcatcagacatgggcccgctactttgtgaaattccttgatgcctatgcagagcacaagctccaattctgggcagtcaccgcagaaaacgagccctcagctgggctgctgtctggctacccctttcagtgcttgggctttactcctgagcatcaacgggacttcattgcccgggatttggggccaacactggccaacagcacccaccacaatgtaagactcctcatgctggatgaccagaggctgctgctccctcattgggccaaggtggtgttgacagacccagaagctgccaaatatgttcatggcatcgctgtccactggtacctggattttttggcccctgcaaaggctactctgggagagacccacagactcttccccaataccatgctgtttgcatcagaagcctgcgtggggagcaaattctgggagcagtctgttaggctgggttcctgggatcggggcatgcaatattcccatagtataataactaacctcctctaccacgtggtaggatggacagactggaatctggctttgaacccagaaggaggccccaattgggtgcgcaactttgttgacagccccatcattgtggatatcacaaaggacaccttctacaaacagcctatgttctatcatctggggcactttagcaagttcattccagagggttcccagagagtaggcttggttgcctcacagaagaatgatctggatgctgtggcactcctgcatcctgacgggagtgcagtggtggtagtactgaacaggtctagcaaagatgttcccttgactatcaaagacccagctgtgggctttctggaaaccatttcccctggatactctatccacacctatctctggagaagacagtaatga

SEQ ID NO: 546 - protein, 536 aa, synthetic construct
  REGION 1..536: note = Variant of B-Glucocerebrosidase
MEFSSPSREECPKPLSRVSIMAGSLTGLLLLQAVSWASGARPCIPKSFGYSSVVCVCNATYCDSFDPPTLPALGTFSRYESTRSGRRMELSMGPIQANHTGTGLLLTLQPEQKFQKTKGFGGAMTDAAALNILALSPPAQNLLLKSYFSEEGIGYNIIRVPMASCDFSIRTYTYADTPDDFQLHNFSLPEEDTKLKIPLIHRALQLSQRPVSLFASPWTSPTWLKTNGAVNGKGSLKGQPGDIYHQTWARYFVKFLDAYAEHKLQFWAVTAENEPSAGLLSGYPFQCLGFTPEHQRDFIARDLGPTLANSTHHNVRLLMLDDQRLLLPHWAKVVLTDPEAAKYVHGIAVHWYLDFLAPAKATLGETHRLFPNTMLFASEACVGSKFWEQSVRLGSWDRGMQYSHSIITNLLYHVVGWTDWNLALNPEGGPNWVRNFVDSPIIVDITKDTFYKQPMFYHLGHFSKFIPEGSQRVGLVASQKNDLDAVALLHPDGSAVVVVLNRSSKDVPLTIKDPAVGFLETISPGYSIHTYLWRRQ

SEQ ID NO: 547 - DNA, 1614 bp, synthetic construct
  misc_feature 1..1614: note = Variant of B-Glucocerebrosidase
  source 1..1614: mol_type = other DNA
atggagttttcttctcctagtagagaagaatgccccaagccactgagcagggtgagcatcatggctggatccctcacagggctgcttcttttgcaggcagtctcatgggcctctggagccaggccctgtattcccaagtcattcggctactcctcagtggtgtgtgtatgcaatgccacctattgtgacagtttcgatcctccaactctccctgctctgggtaccttctcccggtatgagagcacaagaagtggaagacgcatggagctctcaatgggccctatacaggctaaccacactgggacaggtctgctgctgaccctccaacctgaacagaagtttcagaaagtcaagggatttggaggagccatgactgatgcagcagcactcaacatcttggccctgtctccaccagcccagaatctgctgttgaagtcctacttctcagaggaggggattggctacaacatcatccgggttcccatggctagctgtgacttctccattaggacctatacatacgctgacacccccgatgattttcagctccataatttcagtctccctgaagaagacaccaaactgaagatacctctgattcacagagccttgcaactgtcccaaaggccagtgagcctcttcgcttctccctggactagtcctacatggctgaagactaatggtgctgttaatgggaaaggctccctgaaaggacagccaggtgacatatatcatcagacatgggcccgctactttgtgaaattccttgatgcctatgcagagcacaagctccaattctgggcagtcaccgcagaaaacgagccctcagctgggctgctgtctggctacccctttcagtgcttgggctttactcctgagcatcaacgggacttcattgcccgggatttggggccaacactggccaacagcacccaccacaatgtaagactcctcatgctggatgaccagaggctgctgctccctcattgggccaaggtggtgttgacagacccagaagctgccaaatatgttcatggcatcgctgtccactggtacctggattttttggcccctgcaaaggctactctgggagagacccacagactcttccccaataccatgctgtttgcatcagaagcctgcgtggggagcaaattctgggagcagtctgttaggctgggttcctgggatcggggcatgcaatattcccatagtataataactaacctcctctaccacgtggtaggatggacagactggaatctggctttgaacccagaaggaggccccaattgggtgcgcaactttgttgacagccccatcattgtggatatcacaaaggacaccttctacaaacagcctatgttctatcatctggggcactttagcaagttcattatggagggttcccagagagtaggcttggttgcctcacagaagaatgatctggatgctgtggcactcctgcatcctgacgggagtgcagtggtggtagtactgaacaggtctagcaaagatgttcccttgactatcaaagacccagctgtgggctttctggaaaccatttcccctggatactctatccacacctatctctggagaagacagtaatga

SEQ ID NO: 548 - protein, 536 aa, synthetic construct
  REGION 1..536: note = Variant of B-Glucocerebrosidase
MEFSSPSREECPKPLSRVSIMAGSLTGLLLLQAVSWASGARPCIPKSFGYSSVVCVCNATYCDSFDPPTLPALGTFSRYESTRSGRRMELSMGPIQANHTGTGLLLTLQPEQKFQKVKGFGGAMTDAAALNILALSPPAQNLLLKSYFSEEGIGYNIIRVPMASCDFSIRTYTYADTPDDFQLHNFSLPEEDTKLKIPLIHRALQLSQRPVSLFASPWTSPTWLKTNGAVNGKGSLKGQPGDIYHQTWARYFVKFLDAYAEHKLQFWAVTAENEPSAGLLSGYPFQCLGFTPEHQRDFIARDLGPTLANSTHHNVRLLMLDDQRLLLPHWAKVVLTDPEAAKYVHGIAVHWYLDFLAPAKATLGETHRLFPNTMLFASEACVGSKFWEQSVRLGSWDRGMQYSHSIITNLLYHVVGWTDWNLALNPEGGPNWVRNFVDSPIIVDITKDTFYKQPMFYHLGHFSKFIMEGSQRVGLVASQKNDLDAVALLHPDGSAVVVVLNRSSKDVPLTIKDPAVGFLETISPGYSIHTYLWRRQ

SEQ ID NO: 549 - DNA, 1614 bp, synthetic construct
  misc_feature 1..1614: note = Variant of B-Glucocerebrosidase
  source 1..1614: mol_type = other DNA
atggagttttcttctcctagtagagaagaatgccccaagccactgagcagggtgagcatcatggctggatccctcacagggctgcttcttttgcaggcagtctcatgggcctctggagccaggccctgtattcccaagtcattcggctactcctcagtggtgtgtgtatgcaatgccacctattgtgacagtttcgatcctccaactctccctgctctgggtaccttctcccggtatgagagcacaagaagtggaagacgcatggagctctcaatgggccctatacaggctaaccacactgggacaggtctgctgctgaccctccaacctgaacagaagtttcagaaagtcaagggatttggaggagccatgactgatgcagcagcactcaacatcttggccctgtctccaccagcccagaatctgctgttgaagtcctacttctcagaggaggggattggctacaacatcatccgggttcccatggctagctgtgacttctccattaggacctatacatacgctgacacccccgatgattttcagctccataatttcagtctccctgaagaagacaccaaactgaagatacctctgattcacagagccttgcaactgtcccaaaggccagtgagcctcttcgcttctccctggactagtcctacatggctgaagactaatggtgctgttaatgggaaaggctccctgaaaggacagccaggtgacatatatcatcagacatgggcccgctactttgtgaaattccttgatgcctatgcagagcacaagctccaattctgggcagtcaccgcagaaaacgagccctcagctgggctgctgtctggctacccctttcagtgcttgggctttactcctgagcatcaacgggacttcattgcccgggatttggggccaacactggccaacagcacccaccacaatgtaagactcctcatgctggatgaccagaggctgctgctccctcattgggccaaggtggtgttgacagacccagaagctgccaaatatgttcatggcatcgctgtccactggtacctggattttttggcccctgcaaaggctactctgggagagacccacagactcttccccaataccatgctgtttgcatcagaagcctgcgtggggagcaaattctgggagcagtctgttaggctgggttcctgggatcggggcatgcaatattcccatagtataataactaacctcctctaccacgtggtaggatggacagactggaatctggctttgaacccagaaggaggccccaattgggtgcgcaactttgttgacagccccatcattgtggatatcacaaaggacaccttctacaaacagcctatgttctatcatctggggcactttagcaagttcattccagagggttcccggagagtaggcttggttgcctcacagaagaatgatctggatgctgtggcactcctgcatcctgacgggagtgcagtggtggtagtactgaacaggtctagcaaagatgttcccttgactatcaaagacccagctgtgggctttctggaaaccatttcccctggatactctatccacacctatctctggagaagacagtaatga

SEQ ID NO: 550 - protein, 536 aa, synthetic construct
  REGION 1..536: note = Variant of B-Glucocerebrosidase
MEFSSPSREECPKPLSRVSIMAGSLTGLLLLQAVSWASGARPCIPKSFGYSSVVCVCNATYCDSFDPPTLPALGTFSRYESTRSGRRMELSMGPIQANHTGTGLLLTLQPEQKFQKVKGFGGAMTDAAALNILALSPPAQNLLLKSYFSEEGIGYNIIRVPMASCDFSIRTYTYADTPDDFQLHNFSLPEEDTKLKIPLIHRALQLSQRPVSLFASPWTSPTWLKTNGAVNGKGSLKGQPGDIYHQTWARYFVKFLDAYAEHKLQFWAVTAENEPSAGLLSGYPFQCLGFTPEHQRDFIARDLGPTLANSTHHNVRLLMLDDQRLLLPHWAKVVLTDPEAAKYVHGIAVHWYLDFLAPAKATLGETHRLFPNTMLFASEACVGSKFWEQSVRLGSWDRGMQYSHSIITNLLYHVVGWTDWNLALNPEGGPNWVRNFVDSPIIVDITKDTFYKQPMFYHLGHFSKFIPEGSRRVGLVASQKNDLDAVALLHPDGSAVVVVLNRSSKDVPLTIKDPAVGFLETISPGYSIHTYLWRRQ

SEQ ID NO: 551 - DNA, 1614 bp, synthetic construct
  misc_feature 1..1614: note = Variant of B-Glucocerebrosidase
  source 1..1614: mol_type = other DNA
atggagttttcttctcctagtagagaagaatgccccaagccactgagcagggtgagcatcatggctggatccctcacagggctgcttcttttgcaggcagtctcatgggcctctggagccaggccctgtattcccaagtcattcggctactcctcagtggtgtgtgtatgcaatgccacctattgtgacagtttcgatcctccaactctccctgctctgggtaccttctcccggtatgagagcacaagaagtggaagacgcatggagctctcaatgggccctatacaggctaaccacactgggacaggtctgctgctgaccctccaacctgaacagaagtttcagaaagtcaagggatttggaggagccatgactgatgcagcagcactcaacatcttggccctgtctccaccagcccagaatctgctgttgaagtcctacttctcagaggaggggattggctacaacatcatccgggttcccatggctagctgtgacttctccattaggacctatacatacgctgacacccccgatgattttcagctccataatttcagtctccctgaagaagacaccaaactgaagatacctctgattcacagagccttgcaactgtcccaaaggccagtgagcctcttcgcttctccctggactagtcctacatggctgaagactaatggtgctgttaatgggaaaggctccctgaaaggacagccaggtgacatatatcatcagacatgggcccgctactttgtgaaattccttgatgcctatgcagagcacaagctccaattctgggcagtcaccgcagaaaacgagccctcagctgggctgctgtctggctacccctttcagtgcttgggctttactcctgagcatcaacgggacttcattgcccgggatttggggccaacactggccaacagcacccaccacaatgtaagactcctcatgctggatgaccagaggctgctgctccctcattgggccaaggtggtgttgacagacccagaagcttcgaaatatgttcatggcatcgctgtccactggtacctggattttttggcccctgcaaaggctactctgggagagacccacagactcttccccaataccatgctgtttgcatcagaagcctgcgtggggagcaaattctgggagcagtctgttaggctgggttcctgggatcggggcatgcaatattcccatagtataataactaacctcctctaccacgtggtaggatggacagactggaatctggctttgaacccagaaggaggccccaattgggtgcgcaactttgttgacagccccatcattgtggatatcacaaaggacaccttctacaaacagcctatgttctatcatctggggcactttagcaagttcattccagagggttcccagagagtaggcttggttgcctcacagaagaatgatctggatgctgtggcactcctgcatcctgacgggagtgcagtggtggtagtactgaacaggtctagcaaagatgttcccttgactatcaaagacccagctgtgggctttctggaaaccatttcccctggatactctatccacacctatctctggagaagacagtaatga

SEQ ID NO: 552 - protein, 536 aa, synthetic construct
  REGION 1..536: note = Variant of B-Glucocerebrosidase
MEFSSPSREECPKPLSRVSIMAGSLTGLLLLQAVSWASGARPCIPKSFGYSSVVCVCNATYCDSFDPPTLPALGTFSRYESTRSGRRMELSMGPIQANHTGTGLLLTLQPEQKFQKVKGFGGAMTDAAALNILALSPPAQNLLLKSYFSEEGIGYNIIRVPMASCDFSIRTYTYADTPDDFQLHNFSLPEEDTKLKIPLIHRALQLSQRPVSLFASPWTSPTWLKTNGAVNGKGSLKGQPGDIYHQTWARYFVKFLDAYAEHKLQFWAVTAENEPSAGLLSGYPFQCLGFTPEHQRDFIARDLGPTLANSTHHNVRLLMLDDQRLLLPHWAKVVLTDPEASKYVHGIAVHWYLDFLAPAKATLGETHRLFPNTMLFASEACVGSKFWEQSVRLGSWDRGMQYSHSIITNLLYHVVGWTDWNLALNPEGGPNWVRNFVDSPIIVDITKDTFYKQPMFYHLGHFSKFIPEGSQRVGLVASQKNDLDAVALLHPDGSAVVVVLNRSSKDVPLTIKDPAVGFLETISPGYSIHTYLWRRQ

SEQ ID NO: 553 - DNA, 1614 bp, synthetic construct
  misc_feature 1..1614: note = Variant of B-Glucocerebrosidase
  source 1..1614: mol_type = other DNA
atggagttttcttctcctagtagagaagaatgccccaagccactgagcagggtgagcatcatggctggatccctcacagggctgcttcttttgcaggcagtctcatgggcctctggagccaggccctgtattcccaagtcattcggctactcctcagtggtgtgtgtatgcaatgccacctattgtgacagtttcgatcctccaactctccctgctctgggtaccttctcccggtatgagagcacaagaagtggaagacgcatggagctctcaatgggccctatacaggctaaccacactgggacaggtctgctgctgaccctccaacctgaacagaagtttcagaaagtcaagggatttggaggagccatgactgatgcagcagcactcaacatcttggccctgtctccaccagcccagaatctgctgttgaagtcctacttctcagaggaggggattggctacaacatcatccgggttcccatggctagctgtgacttctccattaggacctatacatacgctgacacccccgatgattttcagctccataatttcagtctccctgaagaagacaccaaactgaagatacctctgattcacagagccttgcaactgtcccaaaggccagtgagcctcttcgcttctccctggactagtcctacatggctgaagactaatggtgctgttaatgggaaaggctccctgaaaggacagccaggtgacatatatcatcagacatgggcccgctactttgtgaaattccttgatgcctatgcagagcacaagctccaattctgggcagtcaccgcagaaaacgagccctcagctgggctgctgtctggctacccctttcagtgcttgggctttactcctgagcatcaacgggacttcattgcccgggatttggggccaacactggccaacagcacccaccacaatgtaagactcctcatgctggatgaccagaggctgctgctccctcattgggccaaggtggtgttgacagacccagaagctgccaaatatgttcatggcatcgctgtccactggtacctggattttttggcccctgcaaaggctactctgggagagacccacagactcttccccaataccatgctgtttgcatcagaagcctgcgtggggagcaaattctgggagcagtctgttaggctgggttcctgggatcggggcatgcaatattcccatagtataataactaacctcctctaccacgtggtaggatggacagactggaatctggctttgaacccagaaggaggccccaattgggtgcgcaactttgttgacagccccatcattgtggatatcacaaaggacaccttctacaaacagcctatgttctatcatctggggcactttagcaagttcattccagagggttcccagagagtaggcttggttgcctcacagaagaatgatctggatgctgtggcactcctgggtcctgacgggagtgcagtggtggtagtactgaacaggtctagcaaagatgttcccttgactatcaaagacccagctgtgggctttctggaaaccatttcccctggatactctatccacacctatctctggagaagacagtaatga

SEQ ID NO: 554 - protein, 536 aa, synthetic construct
  REGION 1..536: note = Variant of B-Glucocerebrosidase
MEFSSPSREECPKPLSRVSIMAGSLTGLLLLQAVSWASGARPCIPKSFGYSSVVCVCNATYCDSFDPPTLPALGTFSRYESTRSGRRMELSMGPIQANHTGTGLLLTLQPEQKFQKVKGFGGAMTDAAALNILALSPPAQNLLLKSYFSEEGIGYNIIRVPMASCDFSIRTYTYADTPDDFQLHNFSLPEEDTKLKIPLIHRALQLSQRPVSLFASPWTSPTWLKTNGAVNGKGSLKGQPGDIYHQTWARYFVKFLDAYAEHKLQFWAVTAENEPSAGLLSGYPFQCLGFTPEHQRDFIARDLGPTLANSTHHNVRLLMLDDQRLLLPHWAKVVLTDPEAAKYVHGIAVHWYLDFLAPAKATLGETHRLFPNTMLFASEACVGSKFWEQSVRLGSWDRGMQYSHSIITNLLYHVVGWTDWNLALNPEGGPNWVRNFVDSPIIVDITKDTFYKQPMFYHLGHFSKFIPEGSQRVGLVASQKNDLDAVALLGPDGSAVVVVLNRSSKDVPLTIKDPAVGFLETISPGYSIHTYLWRRQ

SEQ ID NO: 555 - DNA, 1614 bp, synthetic construct
  misc_feature 1..1614: note = Variant of B-Glucocerebrosidase
  source 1..1614: mol_type = other DNA
atggagttttcttctcctagtagagaagaatgccccaagccactgagcagggtgagcatcatggctggatccctcacagggctgcttcttttgcaggcagtctcatgggcctctggagccaggccctgtattcccaagtcattcggctactcctcagtggtgtgtgtatgcaatgccacctattgtgacagtttcgatcctccaactctccctgctctgggtaccttctcccggtatgagagcacaagaagtggaagacgcatggagctctcaatgggccctatacaggctaaccacactgggacaggtctgctgctgaccctccaacctgaacagaagtttcagaaagtcaagggatttggaggagccatgactgatgcagcagcactcaacatcttggccctgtctccaccagcccagaatctgctgttgaagtcctacttctcagaggaggggattggctacaacatcatccgggttcccatggctagctgtgacttctccattaggacctatacatacgctgacacccccgatgattttcagctccataatttcagtctccctgaagaagacaccaaactgaagatacctctgattcacagagccttgcaactgtcccaaaggccagtgagcctcttcgcttctccctggactagtcctacatggctgaagactaatggtgctgttaatgggaaaggctccctgaaaggacagccaggtgacatatatcatcagacatgggcccgctactttgtgaaattccttgatgcctatgcagagcacaagctccaattctgggcagtcaccgcagaaaacgagccctcagctgggctgctgtctggctacccctttcagtgcttgggctttactcctgagcatcaacgggacttcattgcccgggatttggggccaacactggccaacagcacccaccacaatgtaagactcctcatgctggatgaccagaggctgctgctccctcattgggccaaggtggtgttgacagacccagaagctgccaaatatgttcatggcatcgctgtccactggtacctggattttttggcccctgcaaaggctactctgggagagacccacagactcttccccaataccatgctgtttgcatcagaagcctgcgtggggagcaaattctgggagcagtctgttaggctgggttcctgggatcggggcatgcaatattcccatagtataataactaacctcctctaccacgtggtaggatggacagactggaatctggctttgaacccagaaggaggccccaattgggtgcgcaactttgttgacagccccatcattgtggatatcacaaaggacaccttctacaaacagcctatgttctatcatctggggcactttagcaagttcattccagagggttcctttagagtaggcttggttgcctcacagaagaatgatctggatgctgtggcactcctgcatcctgacgggagtgcagtggtggtagtactgaacaggtctagcaaagatgttcccttgactatcaaagacccagctgtgggctttctggaaaccatttcccctggatactctatccacacctatctctggagaagacagtaatga

SEQ ID NO: 556 - protein, 536 aa, synthetic construct
  REGION 1..536: note = Variant of B-Glucocerebrosidase
MEFSSPSREECPKPLSRVSIMAGSLTGLLLLQAVSWASGARPCIPKSFGYSSVVCVCNATYCDSFDPPTLPALGTFSRYESTRSGRRMELSMGPIQANHTGTGLLLTLQPEQKFQKVKGFGGAMTDAAALNILALSPPAQNLLLKSYFSEEGIGYNIIRVPMASCDFSIRTYTYADTPDDFQLHNFSLPEEDTKLKIPLIHRALQLSQRPVSLFASPWTSPTWLKTNGAVNGKGSLKGQPGDIYHQTWARYFVKFLDAYAEHKLQFWAVTAENEPSAGLLSGYPFQCLGFTPEHQRDFIARDLGPTLANSTHHNVRLLMLDDQRLLLPHWAKVVLTDPEAAKYVHGIAVHWYLDFLAPAKATLGETHRLFPNTMLFASEACVGSKFWEQSVRLGSWDRGMQYSHSIITNLLYHVVGWTDWNLALNPEGGPNWVRNFVDSPIIVDITKDTFYKQPMFYHLGHFSKFIPEGSFRVGLVASQKNDLDAVALLHPDGSAVVVVLNRSSKDVPLTIKDPAVGFLETISPGYSIHTYLWRRQ

SEQ ID NO: 557 - DNA, 1614 bp, synthetic construct
  misc_feature 1..1614: note = Variant of B-Glucocerebrosidase
  source 1..1614: mol_type = other DNA
atggagttttcttctcctagtagagaagaatgccccaagccactgagcagggtgagcatcatggctggatccctcacagggctgcttcttttgcaggcagtctcatgggcctctggagccaggccctgtattcccaagtcattcggctactcctcagtggtgtgtgtatgcaatgccacctattgtgacagtttcgatcctccaactctccctgctctgggtaccttctcccggtatgagagcacaagaagtggaagacgcatggagctctcaatgggccctatacaggctaaccacactgggacaggtctgctgctgaccctccaacctgaacagaagtttcagaaagtcaagggatttggaggagccatgactgatgcagcagcactcaacatcttggccctgtctccaccagcccagaatctgctgttgaagtcctacttctcagaggaggggattggctacaacatcatccgggttcccatggctagctgtgacttctccattaggacctatacatacgctgacacccccgatgattttcagctccataatttcagtctccctgaagaagacaccaaactgaagatacctctgattcacagagccttgcaactgtcccaaaggccagtgagcctcttcgcttctccctggactagtcctacatggctgaagactaatggtgctgttaatgggaaaggctccctgaaaggacagccaggtgacatatatcatcagacatgggcccgctactttgtgaaattccttgatgcctatgcagagcacaagctccaattctgggcagtcaccgcagaaaacgagccctcagctgggctgctgtctggctacccctttcagtgcttgggctttactcctgagcatcaacgggacttcattgcccgggatttggggccaacactggccaacagcacccaccacaatgtaagactcctcatgctggatgaccagaggctgctgctccctcattgggccaaggtggtgttgacagacccagaagctgccaaatatgttcatggcatcgctgtccactggtacctggattttttggcccctgcaaaggctactctgggagagacccacagactcttccccaataccatgctgtttgcatcagaagcctgcgtggggagcaaattctgggagcagtctgttaggctgggttcctgggatcggggcatgcaatattcccatagtataataactaacctcctctaccacgtggtaggatggacagactggaatctggctttgaacccagaaggaggccccaattgggtgcgcaactttgttgacagccccatcattgtggatatcacaaaggacaccttctacaaacagcctatgttctatcatctggggcactttagcaagttcattccagagggttcccagagagtaggcttggttgcctcacagaagaatgatctggatgctgtggcactcctgacgcctgacgggagtgcagtggtggtagtactgaacaggtctagcaaagatgttcccttgactatcaaagacccagctgtgggctttctggaaaccatttcccctggatactctatccacacctatctctggagaagacagtaatga

SEQ ID NO: 558 - protein, 536 aa, synthetic construct
  REGION 1..536: note = Variant of B-Glucocerebrosidase
MEFSSPSREECPKPLSRVSIMAGSLTGLLLLQAVSWASGARPCIPKSFGYSSVVCVCNATYCDSFDPPTLPALGTFSRYESTRSGRRMELSMGPIQANHTGTGLLLTLQPEQKFQKVKGFGGAMTDAAALNILALSPPAQNLLLKSYFSEEGIGYNIIRVPMASCDFSIRTYTYADTPDDFQLHNFSLPEEDTKLKIPLIHRALQLSQRPVSLFASPWTSPTWLKTNGAVNGKGSLKGQPGDIYHQTWARYFVKFLDAYAEHKLQFWAVTAENEPSAGLLSGYPFQCLGFTPEHQRDFIARDLGPTLANSTHHNVRLLMLDDQRLLLPHWAKVVLTDPEAAKYVHGIAVHWYLDFLAPAKATLGETHRLFPNTMLFASEACVGSKFWEQSVRLGSWDRGMQYSHSIITNLLYHVVGWTDWNLALNPEGGPNWVRNFVDSPIIVDITKDTFYKQPMFYHLGHFSKFIPEGSQRVGLVASQKNDLDAVALLTPDGSAVVVVLNRSSKDVPLTIKDPAVGFLETISPGYSIHTYLWRRQ

SEQ ID NO: 559 - DNA, 1614 bp, synthetic construct
  misc_feature 1..1614: note = Variant of B-Glucocerebrosidase
  source 1..1614: mol_type = other DNA
atggagttttcttctcctagtagagaagaatgccccaagccactgagcagggtgagcatcatggctggatccctcacagggctgcttcttttgcaggcagtctcatgggcctctggagccaggccctgtattcccaagtcattcggctactcctcagtggtgtgtgtatgcaatgccacctattgtgacagtttcgatcctccaactctccctgctctgggtaccttctcccggtatgagagcacaagaagtggaagacgcatggagctctcaatgggccctatacaggctaaccacactgggacaggtctgctgctgaccctccaacctgaacagaagtttcagaaagtcaagggatttggaggagccatgactgatgcagcagcactcaacatcttggccctgtctccaccagcccagaatctgctgttgaagtcctacttctcagaggaggggattggctacaacatcatccgggttcccatggctagctgtgacttctccattaggacctatacatacgctgacacccccgatgattttcagctccataatttcagtctccctgaagaagacaccaaactgaagatacctctgattcacagagccttgcaactgtcccaaaggccagtgagcctcttcgcttctccctggactagtcctacatggctgaagactaatggtgctgttaatgggaaaggctccctgaaaggacagccaggtgacatatatcatcagacatgggcccgctactttgtgaaattccttgatgcctatgcagagcacaagctccaattctgggcagtcaccgcagaaaacgagccctcagctgggctgctgtctggctacccctttcagtgcttgggctttactcctgagcatcaacgggacttcattgcccgggatttggggccaacactggccaacagcacccaccacaatgtaagactcctcatgctggatgaccagaggctgctgctccctcattgggccaagacggtgttgacagacccagaagctgccaaatatgttcatggcatcgctgtccactggtacctggattttttggcccctgcaaaggctactctgggagagacccacagactcttccccaataccatgctgtttgcatcagaagcctgcgtggggagcaaattctgggagcagtctgttaggctgggttcctgggatcggggcatgcaatattcccatagtataataactaacctcctctaccacgtggtaggatggacagactggaatctggctttgaacccagaaggaggccccaattgggtgcgcaactttgttgacagccccatcattgtggatatcacaaaggacaccttctacaaacagcctatgttctatcatctggggcactttagcaagttcattccagagggttcccagagagtaggcttggttgcctcacagaagaatgatctggatgctgtggcactcctgcatcctgacgggagtgcagtggtggtagtactgaacaggtctagcaaagatgttcccttgactatcaaagacccagctgtgggctttctggaaaccatttcccctggatactctatccacacctatctctggagaagacagtaatga

SEQ ID NO: 560 - protein, 536 aa, synthetic construct
  REGION 1..536: note = Variant of B-Glucocerebrosidase
MEFSSPSREECPKPLSRVSIMAGSLTGLLLLQAVSWASGARPCIPKSFGYSSVVCVCNATYCDSFDPPTLPALGTFSRYESTRSGRRMELSMGPIQANHTGTGLLLTLQPEQKFQKVKGFGGAMTDAAALNILALSPPAQNLLLKSYFSEEGIGYNIIRVPMASCDFSIRTYTYADTPDDFQLHNFSLPEEDTKLKIPLIHRALQLSQRPVSLFASPWTSPTWLKTNGAVNGKGSLKGQPGDIYHQTWARYFVKFLDAYAEHKLQFWAVTAENEPSAGLLSGYPFQCLGFTPEHQRDFIARDLGPTLANSTHHNVRLLMLDDQRLLLPHWAKTVLTDPEAAKYVHGIAVHWYLDFLAPAKATLGETHRLFPNTMLFASEACVGSKFWEQSVRLGSWDRGMQYSHSIITNLLYHVVGWTDWNLALNPEGGPNWVRNFVDSPIIVDITKDTFYKQPMFYHLGHFSKFIPEGSQRVGLVASQKNDLDAVALLHPDGSAVVVVLNRSSKDVPLTIKDPAVGFLETISPGYSIHTYLWRRQ

SEQ ID NO: 561 - DNA, 1614 bp, synthetic construct
  misc_feature 1..1614: note = Variant of B-Glucocerebrosidase
  source 1..1614: mol_type = other DNA
atggagttttcttctcctagtagagaagaatgccccaagccactgagcagggtgagcatcatggctggatccctcacagggctgcttcttttgcaggcagtctcatgggcctctggagccaggccctgtattcccaagtcattcggctactcctcagtggtgtgtgtatgcaatgccacctattgtgacagtttcgatcctccaactctccctgctctgggtaccttctcccggtatgagagcacaagaagtggaagacgcatggagctctcaatgggccctatacaggctaaccacactcgtacaggtctgctgctgaccctccaacctgaacagaagtttcagaaagtcaagggatttggaggagccatgactgatgcagcagcactcaacatcttggccctgtctccaccagcccagaatctgctgttgaagtcctacttctcagaggaggggattggctacaacatcatccgggttcccatggctagctgtgacttctccattaggacctatacatacgctgacacccccgatgattttcagctccataatttcagtctccctgaagaagacaccaaactgaagatacctctgattcacagagccttgcaactgtcccaaaggccagtgagcctcttcgcttctccctggactagtcctacatggctgaagactaatggtgctgttaatgggaaaggctccctgaaaggacagccaggtgacatatatcatcagacatgggcccgctactttgtgaaattccttgatgcctatgcagagcacaagctccaattctgggcagtcaccgcagaaaacgagccctcagctgggctgctgtctggctacccctttcagtgcttgggctttactcctgagcatcaacgggacttcattgcccgggatttggggccaacactggccaacagcacccaccacaatgtaagactcctcatgctggatgaccagaggctgctgctccctcattgggccaaggtggtgttgacagacccagaagctgccaaatatgttcatggcatcgctgtccactggtacctggattttttggcccctgcaaaggctactctgggagagacccacagactcttccccaataccatgctgtttgcatcagaagcctgcgtggggagcaaattctgggagcagtctgttaggctgggttcctgggatcggggcatgcaatattcccatagtataataactaacctcctctaccacgtggtaggatggacagactggaatctggctttgaacccagaaggaggccccaattgggtgcgcaactttgttgacagccccatcattgtggatatcacaaaggacaccttctacaaacagcctatgttctatcatctggggcactttagcaagttcattccagagggttcccagagagtaggcttggttgcctcacagaagaatgatctggatgctgtggcactcctgcatcctgacgggagtgcagtggtggtagtactgaacaggtctagcaaagatgttcccttgactatcaaagacccagctgtgggctttctggaaaccatttcccctggatactctatccacacctatctctggagaagacagtaatga

SEQ ID NO: 562 - protein, 536 aa, synthetic construct
  REGION 1..536: note = Variant of B-Glucocerebrosidase
MEFSSPSREECPKPLSRVSIMAGSLTGLLLLQAVSWASGARPCIPKSFGYSSVVCVCNATYCDSFDPPTLPALGTFSRYESTRSGRRMELSMGPIQANHTRTGLLLTLQPEQKFQKVKGFGGAMTDAAALNILALSPPAQNLLLKSYFSEEGIGYNIIRVPMASCDFSIRTYTYADTPDDFQLHNFSLPEEDTKLKIPLIHRALQLSQRPVSLFASPWTSPTWLKTNGAVNGKGSLKGQPGDIYHQTWARYFVKFLDAYAEHKLQFWAVTAENEPSAGLLSGYPFQCLGFTPEHQRDFIARDLGPTLANSTHHNVRLLMLDDQRLLLPHWAKVVLTDPEAAKYVHGIAVHWYLDFLAPAKATLGETHRLFPNTMLFASEACVGSKFWEQSVRLGSWDRGMQYSHSIITNLLYHVVGWTDWNLALNPEGGPNWVRNFVDSPIIVDITKDTFYKQPMFYHLGHFSKFIPEGSQRVGLVASQKNDLDAVALLHPDGSAVVVVLNRSSKDVPLTIKDPAVGFLETISPGYSIHTYLWRRQ

SEQ ID NO: 563 - DNA, 1614 bp, synthetic construct
  misc_feature 1..1614: note = Variant of B-Glucocerebrosidase
  source 1..1614: mol_type = other DNA
atggagttttcttctcctagtagagaagaatgccccaagccactgagcagggtgagcatcatggctggatccctcacagggctgcttcttttgcaggcagtctcatgggcctctggagccaggccctgtattcccaagtcattcggctactcctcagtggtgtgtgtatgcaatgccacctattgtgacagtttcgatcctccaactctccctgctctgggtaccttctcccggtatgagagcacaagaagtggaagacgcatggagctctcaatgggccctatacaggctaaccacactgggacaggtctgctgctgaccctccaacctgaacagaagtttcagaaagtcaagggatttggaggagccatgactgatgcagcagcactcaacatcttggccctgtctccaccagcccagaatctgctgttgaagtcctacttctcagaggaggggattggctacaacatcatccgggttcccatggctagctgtgacttctccattaggacctatacatacgctgacacccccgatgattttcagctccataatttcagtctccctgaagaagacaccaaactgaagatacctctgattcacagagccttgcaactgtcccaaaggccagtgagcctcttcgcttctccctggactagtcctacatggctgaagactaatggtgctgttaatgggaaaggctccctgaaaggacagccaggtgacatatatcatcagacatgggcccgctactttgtgaaattccttgatgcctatgcagagcacaagctccaattctgggcagtcaccgcagaaaacgagccctcagctgggctgctgtctggctacccctttcagtgcttgggctttactcctgagcatcaacgggacttcattgcccgggatttggggccaacactggccaacagcacccaccacaatgtaagactcctcatgctggatgaccagaggctgctgctccctcattgggccaaggtggtgttgacagacccagaagctgccaaatatgttcatggcatcgctgtccactggtacctggattttttggcccctgcaaaggctactctgggagagacccacagactcttccccaatgtgatgctgtttgcatcagaagcctgcgtggggagcaaattctgggagcagtctgttaggctgggttcctgggatcggggcatgcaatattcccatagtataataactaacctcctctaccacgtggtaggatggacagactggaatctggctttgaacccagaaggaggccccaattgggtgcgcaactttgttgacagccccatcattgtggatatcacaaaggacaccttctacaaacagcctatgttctatcatctggggcactttagcaagttcattccagagggttcccagagagtaggcttggttgcctcacagaagaatgatctggatgctgtggcactcctgcatcctgacgggagtgcagtggtggtagtactgaacaggtctagcaaagatgttcccttgactatcaaagacccagctgtgggctttctggaaaccatttcccctggatactctatccacacctatctctggagaagacagtaatga

SEQ ID NO: 564 - protein, 536 aa, synthetic construct
  REGION 1..536: note = Variant of B-Glucocerebrosidase
MEFSSPSREECPKPLSRVSIMAGSLTGLLLLQAVSWASGARPCIPKSFGYSSVVCVCNATYCDSFDPPTLPALGTFSRYESTRSGRRMELSMGPIQANHTGTGLLLTLQPEQKFQKVKGFGGAMTDAAALNILALSPPAQNLLLKSYFSEEGIGYNIIRVPMASCDFSIRTYTYADTPDDFQLHNFSLPEEDTKLKIPLIHRALQLSQRPVSLFASPWTSPTWLKTNGAVNGKGSLKGQPGDIYHQTWARYFVKFLDAYAEHKLQFWAVTAENEPSAGLLSGYPFQCLGFTPEHQRDFIARDLGPTLANSTHHNVRLLMLDDQRLLLPHWAKVVLTDPEAAKYVHGIAVHWYLDFLAPAKATLGETHRLFPNVMLFASEACVGSKFWEQSVRLGSWDRGMQYSHSIITNLLYHVVGWTDWNLALNPEGGPNWVRNFVDSPIIVDITKDTFYKQPMFYHLGHFSKFIPEGSQRVGLVASQKNDLDAVALLHPDGSAVVVVLNRSSKDVPLTIKDPAVGFLETISPGYSIHTYLWRRQ

SEQ ID NO: 565 - DNA, 1614 bp, synthetic construct
  misc_feature 1..1614: note = Variant of B-Glucocerebrosidase
  source 1..1614: mol_type = other DNA
atggagttttcttctcctagtagagaagaatgccccaagccactgagcagggtgagcatcatggctggatccctcacagggctgcttcttttgcaggcagtctcatgggcctctggagccaggccctgtattcccaagtcattcggctactcctcagtggtgtgtgtatgcaatgccacctattgtgacagtttcgatcctccaactctccctgctctgggtaccttctcccggtatgagagcacaagaagtggaagacgcatggagctctcaatgggccctatacaggctaaccacactgtgacaggtctgctgctgaccctccaacctgaacagaagtttcagaaagtcaagggatttggaggagccatgactgatgcagcagcactcaacatcttggccctgtctccaccagcccagaatctgctgttgaagtcctacttctcagaggaggggattggctacaacatcatccgggttcccatggctagctgtgacttctccattaggacctatacatacgctgacacccccgatgattttcagctccataatttcagtctccctgaagaagacaccaaactgaagatacctctgattcacagagccttgcaactgtcccaaaggccagtgagcctcttcgcttctccctggactagtcctacatggctgaagactaatggtgctgttaatgggaaaggctccctgaaaggacagccaggtgacatatatcatcagacatgggcccgctactttgtgaaattccttgatgcctatgcagagcacaagctccaattctgggcagtcaccgcagaaaacgagccctcagctgggctgctgtctggctacccctttcagtgcttgggctttactcctgagcatcaacgggacttcattgcccgggatttggggccaacactggccaacagcacccaccacaatgtaagactcctcatgctggatgaccagaggctgctgctccctcattgggccaaggtggtgttgacagacccagaagctgccaaatatgttcatggcatcgctgtccactggtacctggattttttggcccctgcaaaggctactctgggagagacccacagactcttccccaataccatgctgtttgcatcagaagcctgcgtggggagcaaattctgggagcagtctgttaggctgggttcctgggatcggggcatgcaatattcccatagtataataactaacctcctctaccacgtggtaggatggacagactggaatctggctttgaacccagaaggaggccccaattgggtgcgcaactttgttgacagccccatcattgtggatatcacaaaggacaccttctacaaacagcctatgttctatcatctggggcactttagcaagttcattccagagggttcccagagagtaggcttggttgcctcacagaagaatgatctggatgctgtggcactcctgcatcctgacgggagtgcagtggtggtagtactgaacaggtctagcaaagatgttcccttgactatcaaagacccagctgtgggctttctggaaaccatttcccctggatactctatccacacctatctctggagaagacagtaatga

SEQ ID NO: 566 - protein, 536 aa, synthetic construct
  REGION 1..536: note = Variant of B-Glucocerebrosidase
MEFSSPSREECPKPLSRVSIMAGSLTGLLLLQAVSWASGARPCIPKSFGYSSVVCVCNATYCDSFDPPTLPALGTFSRYESTRSGRRMELSMGPIQANHTVTGLLLTLQPEQKFQKVKGFGGAMTDAAALNILALSPPAQNLLLKSYFSEEGIGYNIIRVPMASCDFSIRTYTYADTPDDFQLHNFSLPEEDTKLKIPLIHRALQLSQRPVSLFASPWTSPTWLKTNGAVNGKGSLKGQPGDIYHQTWARYFVKFLDAYAEHKLQFWAVTAENEPSAGLLSGYPFQCLGFTPEHQRDFIARDLGPTLANSTHHNVRLLMLDDQRLLLPHWAKVVLTDPEAAKYVHGIAVHWYLDFLAPAKATLGETHRLFPNTMLFASEACVGSKFWEQSVRLGSWDRGMQYSHSIITNLLYHVVGWTDWNLALNPEGGPNWVRNFVDSPIIVDITKDTFYKQPMFYHLGHFSKFIPEGSQRVGLVASQKNDLDAVALLHPDGSAVVVVLNRSSKDVPLTIKDPAVGFLETISPGYSIHTYLWRRQ

SEQ ID NO: 567 - DNA, 1614 bp, synthetic construct
  misc_feature 1..1614: note = Variant of B-Glucocerebrosidase
  source 1..1614: mol_type = other DNA
atggagttttcttctcctagtagagaagaatgccccaagccactgagcagggtgagcatcatggctggatccctcacagggctgcttcttttgcaggcagtctcatgggcctctggagccaggccctgtattcccaagtcattcggctactcctcagtggtgtgtgtatgcaatgccacctattgtgacagtttcgatcctccaactctccctgctctgggtaccttctcccggtatgagagcacaagaagtggaagacgcatggagctctcaatgggccctatacaggctaaccacacttggacaggtctgctgctgaccctccaacctgaacagaagtttcagaaagtcaagggatttggaggagccatgactgatgcagcagcactcaacatcttggccctgtctccaccagcccagaatctgctgttgaagtcctacttctcagaggaggggattggctacaacatcatccgggttcccatggctagctgtgacttctccattaggacctatacatacgctgacacccccgatgattttcagctccataatttcagtctccctgaagaagacaccaaactgaagatacctctgattcacagagccttgcaactgtcccaaaggccagtgagcctcttcgcttctccctggactagtcctacatggctgaagactaatggtgctgttaatgggaaaggctccctgaaaggacagccaggtgacatatatcatcagacatgggcccgctactttgtgaaattccttgatgcctatgcagagcacaagctccaattctgggcagtcaccgcagaaaacgagccctcagctgggctgctgtctggctacccctttcagtgcttgggctttactcctgagcatcaacgggacttcattgcccgggatttggggccaacactggccaacagcacccaccacaatgtaagactcctcatgctggatgaccagaggctgctgctccctcattgggccaaggtggtgttgacagacccagaagctgccaaatatgttcatggcatcgctgtccactggtacctggattttttggcccctgcaaaggctactctgggagagacccacagactcttccccaataccatgctgtttgcatcagaagcctgcgtggggagcaaattctgggagcagtctgttaggctgggttcctgggatcggggcatgcaatattcccatagtataataactaacctcctctaccacgtggtaggatggacagactggaatctggctttgaacccagaaggaggccccaattgggtgcgcaactttgttgacagccccatcattgtggatatcacaaaggacaccttctacaaacagcctatgttctatcatctggggcactttagcaagttcattccagagggttcccagagagtaggcttggttgcctcacagaagaatgatctggatgctgtggcactcctgcatcctgacgggagtgcagtggtggtagtactgaacaggtctagcaaagatgttcccttgactatcaaagacccagctgtgggctttctggaaaccatttcccctggatactctatccacacctatctctggagaagacagtaatga

SEQ ID NO: 568 - protein, 536 aa, synthetic construct
  REGION 1..536: note = Variant of B-Glucocerebrosidase
MEFSSPSREECPKPLSRVSIMAGSLTGLLLLQAVSWASGARPCIPKSFGYSSVVCVCNATYCDSFDPPTLPALGTFSRYESTRSGRRMELSMGPIQANHTWTGLLLTLQPEQKFQKVKGFGGAMTDAAALNILALSPPAQNLLLKSYFSEEGIGYNIIRVPMASCDFSIRTYTYADTPDDFQLHNFSLPEEDTKLKIPLIHRALQLSQRPVSLFASPWTSPTWLKTNGAVNGKGSLKGQPGDIYHQTWARYFVKFLDAYAEHKLQFWAVTAENEPSAGLLSGYPFQCLGFTPEHQRDFIARDLGPTLANSTHHNVRLLMLDDQRLLLPHWAKVVLTDPEAAKYVHGIAVHWYLDFLAPAKATLGETHRLFPNTMLFASEACVGSKFWEQSVRLGSWDRGMQYSHSIITNLLYHVVGWTDWNLALNPEGGPNWVRNFVDSPIIVDITKDTFYKQPMFYHLGHFSKFIPEGSQRVGLVASQKNDLDAVALLHPDGSAVVVVLNRSSKDVPLTIKDPAVGFLETISPGYSIHTYLWRRQ

SEQ ID NO: 569 - DNA, 1614 bp, synthetic construct
  misc_feature 1..1614: note = Variant of B-Glucocerebrosidase
  source 1..1614: mol_type = other DNA
atggagttttcttctcctagtagagaagaatgccccaagccactgagcagggtgagcatcatggctggatccctcacagggctgcttcttttgcaggcagtctcatgggcctctggagccaggccctgtattcccaagtcattcggctactcctcagtggtgtgtgtatgcaatgccacctattgtgacagttcggatcctccaactctccctgctctgggtaccttctcccggtatgagagcacaagaagtggaagacgcatggagctctcaatgggccctatacaggctaaccacactgggacaggtctgctgctgaccctccaacctgaacagaagtttcagaaagtcaagggatttggaggagccatgactgatgcagcagcactcaacatcttggccctgtctccaccagcccagaatctgctgttgaagtcctacttctcagaggaggggattggctacaacatcatccgggttcccatggctagctgtgacttctccattaggacctatacatacgctgacacccccgatgattttcagctccataatttcagtctccctgaagaagacaccaaactgaagatacctctgattcacagagccttgcaactgtcccaaaggccagtgagcctcttcgcttctccctggactagtcctacatggctgaagactaatggtgctgttaatgggaaaggctccctgaaaggacagccaggtgacatatatcatcagacatgggcccgctactttgtgaaattccttgatgcctatgcagagcacaagctccaattctgggcagtcaccgcagaaaacgagccctcagctgggctgctgtctggctacccctttcagtgcttgggctttactcctgagcatcaacgggacttcattgcccgggatttggggccaacactggccaacagcacccaccacaatgtaagactcctcatgctggatgaccagaggctgctgctccctcattgggccaaggtggtgttgacagacccagaagctgccaaatatgttcatggcatcgctgtccactggtacctggattttttggcccctgcaaaggctactctgggagagacccacagactcttccccaataccatgctgtttgcatcagaagcctgcgtggggagcaaattctgggagcagtctgttaggctgggttcctgggatcggggcatgcaatattcccatagtataataactaacctcctctaccacgtggtaggatggacagactggaatctggctttgaacccagaaggaggccccaattgggtgcgcaactttgttgacagccccatcattgtggatatcacaaaggacaccttctacaaacagcctatgttctatcatctggggcactttagcaagttcattccagagggttcccagagagtaggcttggttgcctcacagaagaatgatctggatgctgtggcactcctgcatcctgacgggagtgcagtggtggtagtactgaacaggtctagcaaagatgttcccttgactatcaaagacccagctgtgggctttctggaaaccatttcccctggatactctatccacacctatctctggagaagacagtaatga

SEQ ID NO: 570 - protein, 536 aa, synthetic construct
  REGION 1..536: note = Variant of B-Glucocerebrosidase
MEFSSPSREECPKPLSRVSIMAGSLTGLLLLQAVSWASGARPCIPKSFGYSSVVCVCNATYCDSSDPPTLPALGTFSRYESTRSGRRMELSMGPIQANHTGTGLLLTLQPEQKFQKVKGFGGAMTDAAALNILALSPPAQNLLLKSYFSEEGIGYNIIRVPMASCDFSIRTYTYADTPDDFQLHNFSLPEEDTKLKIPLIHRALQLSQRPVSLFASPWTSPTWLKTNGAVNGKGSLKGQPGDIYHQTWARYFVKFLDAYAEHKLQFWAVTAENEPSAGLLSGYPFQCLGFTPEHQRDFIARDLGPTLANSTHHNVRLLMLDDQRLLLPHWAKVVLTDPEAAKYVHGIAVHWYLDFLAPAKATLGETHRLFPNTMLFASEACVGSKFWEQSVRLGSWDRGMQYSHSIITNLLYHVVGWTDWNLALNPEGGPNWVRNFVDSPIIVDITKDTFYKQPMFYHLGHFSKFIPEGSQRVGLVASQKNDLDAVALLHPDGSAVVVVLNRSSKDVPLTIKDPAVGFLETISPGYSIHTYLWRRQ

SEQ ID NO: 571 - DNA, 1614 bp, synthetic construct
  misc_feature 1..1614: note = Variant of B-Glucocerebrosidase
  source 1..1614: mol_type = other DNA
atggagttttcttctcctagtagagaagaatgccccaagccactgagcagggtgagcatcatggctggatccctcacagggctgcttcttttgcaggcagtctcatgggcctctggagccaggccctgtattcccaagtcattcggctactcctcagtggtgtgtgtatgcaatgccacctattgtgacagtttcgatcctccaactctccctgctctgggtaccttctcccggtatgagagcacaagaagtggaagacgcatggagctctcaatgggccctatacaggctaaccacactgggacaggtctgctgctgaccctccaacctgaacagaagtttcagaaagtcaagggatttggaggagccatgactgatgcagcagcactcaacatcttggccctgtctccaccagcccagaatctgctgttgaagtcctacttctcagaggaggggattggctacaacatcatccgggttcccatggctagctgtgacttctccattaggacctatacatacgctgacacccccgatgattttcagctccataatttcagtctccctgaagaagacaccaaactgaagatacctctgattcacagagccttgcaactgtcccaaaggccagtgagcctcttcgcttctccctggactagtcctacatggctgaagactaatggtgctgttaatgggaaaggctccctgaaaggacagccaggtgacatatatcatcagacatgggcccgctactttgtgaaattccttgatgcctatgcagagcacaagctccaattctgggcagtcaccgcagaaaacgagccctcagctgggctgctgtctggctacccctttcagtgcttgggctttactcctgagcatcaacgggacttcattgcccgggatttggggccaacactggccaacagcacccaccacaatgtaagactcctcatgctggatgaccagaggctgctgctccctcattgggccaaggtggtgttgacagacccagaagctgccaaatatgttcatggcatcgctgtccactggtacctggattttttggcccctgcaaaggctactctgggagagacccacagactcttccccaataccatgctgtttgcatcagaagcctgcgtggggagcaaattctgggagcagtctgttaggctgggttcctgggatcggggcatgcaatattcccatagtataataactaacctcctctaccacgtggtaggatggacagactggaatctggctttgaacccagaaggaggccccaattgggtgcgcaactttgttgacagccccatcattgtggatatcacaaaggacaccttctacaaacagcctatgttctatcatctggggcactttagcaagttcattccagagggttcccagagagtaggcttggttgcctcacagaagaatgatctggatgctgtggcactcctggtgcctgacgggagtgcagtggtggtagtactgaacaggtctagcaaagatgttcccttgactatcaaagacccagctgtgggctttctggaaaccatttcccctggatactctatccacacctatctctggagaagacagtaatga

SEQ ID NO: 572 - protein, 536 aa, synthetic construct
  REGION 1..536: note = Variant of B-Glucocerebrosidase
MEFSSPSREECPKPLSRVSIMAGSLTGLLLLQAVSWASGARPCIPKSFGYSSVVCVCNATYCDSFDPPTLPALGTFSRYESTRSGRRMELSMGPIQANHTGTGLLLTLQPEQKFQKVKGFGGAMTDAAALNILALSPPAQNLLLKSYFSEEGIGYNIIRVPMASCDFSIRTYTYADTPDDFQLHNFSLPEEDTKLKIPLIHRALQLSQRPVSLFASPWTSPTWLKTNGAVNGKGSLKGQPGDIYHQTWARYFVKFLDAYAEHKLQFWAVTAENEPSAGLLSGYPFQCLGFTPEHQRDFIARDLGPTLANSTHHNVRLLMLDDQRLLLPHWAKVVLTDPEAAKYVHGIAVHWYLDFLAPAKATLGETHRLFPNTMLFASEACVGSKFWEQSVRLGSWDRGMQYSHSIITNLLYHVVGWTDWNLALNPEGGPNWVRNFVDSPIIVDITKDTFYKQPMFYHLGHFSKFIPEGSQRVGLVASQKNDLDAVALLVPDGSAVVVVLNRSSKDVPLTIKDPAVGFLETISPGYSIHTYLWRRQ

SEQ ID NO: 573 - DNA, 1614 bp, synthetic construct
  misc_feature 1..1614: note = Variant of B-Glucocerebrosidase
  source 1..1614: mol_type = other DNA
atggagttttcttctcctagtagagaagaatgccccaagccactgagcagggtgagcatcatggctggatccctcacagggctgcttcttttgcaggcagtctcatgggcctctggagccaggccctgtattcccaagtcattcggctactcctcagtggtgtgtgtatgcaatgccacctattgtgacagtttcgatcctccaactctccctgctctgggtaccttctcccggtatgagagcacaagaagtggaagacgcatggagctctcaatgggccctatacaggctaaccacactgggacaggtctgctgctgaccctccaacctgaacagaagtttcagaaagtcaagggatttggaggagccatgactgatgcagcagcactcaacatcttggccctgtctccaccagcccagaatctgctgttgaagtcctacttctcagaggaggggattggctacaacatcatccgggttcccatggctagctgtgacttctccattaggacctatacatacgctgacacccccgatgattttcagctccataatttcagtctccctgaagaagacaccaaactgaagatacctctgattcacagagccttgcaactgtcccaaaggccagtgagcctcttcgcttctccctggactagtcctacatggctgaagactaatggtgctgttaatgggaaaggctccctgaaaggacagccaggtgacatatatcatcagacatgggcccgctactttgtgaaattccttgatgcctatgcagagcacaagctccaattctgggcagtcaccgcagaaaacgagccctcagctgggctgctgtctggctacccctttcagtgcttgggctttactcctgagcatcaacgggacttcattgcccgggatttggggccaacactggccaacagcacccaccacaatgtaagactcctcatgctggatgaccagaggctgctgctccctcattgggccaaggtggtgttgacaaatccagaagctgccaaatatgttcatggcatcgctgtccactggtacctggattttttggcccctgcaaaggctactctgggagagacccacagactcttccccaataccatgctgtttgcatcagaagcctgcgtggggagcaaattctgggagcagtctgttaggctgggttcctgggatcggggcatgcaatattcccatagtataataactaacctcctctaccacgtggtaggatggacagactggaatctggctttgaacccagaaggaggccccaattgggtgcgcaactttgttgacagccccatcattgtggatatcacaaaggacaccttctacaaacagcctatgttctatcatctggggcactttagcaagttcattccagagggttcccagagagtaggcttggttgcctcacagaagaatgatctggatgctgtggcactcctgcatcctgacgggagtgcagtggtggtagtactgaacaggtctagcaaagatgttcccttgactatcaaagacccagctgtgggctttctggaaaccatttcccctggatactctatccacacctatctctggagaagacagtaatga

SEQ ID NO: 574 - protein, 536 aa, synthetic construct
  REGION 1..536: note = Variant of B-Glucocerebrosidase
MEFSSPSREECPKPLSRVSIMAGSLTGLLLLQAVSWASGARPCIPKSFGYSSVVCVCNATYCDSFDPPTLPALGTFSRYESTRSGRRMELSMGPIQANHTGTGLLLTLQPEQKFQKVKGFGGAMTDAAALNILALSPPAQNLLLKSYFSEEGIGYNIIRVPMASCDFSIRTYTYADTPDDFQLHNFSLPEEDTKLKIPLIHRALQLSQRPVSLFASPWTSPTWLKTNGAVNGKGSLKGQPGDIYHQTWARYFVKFLDAYAEHKLQFWAVTAENEPSAGLLSGYPFQCLGFTPEHQRDFIARDLGPTLANSTHHNVRLLMLDDQRLLLPHWAKVVLTNPEAAKYVHGIAVHWYLDFLAPAKATLGETHRLFPNTMLFASEACVGSKFWEQSVRLGSWDRGMQYSHSIITNLLYHVVGWTDWNLALNPEGGPNWVRNFVDSPIIVDITKDTFYKQPMFYHLGHFSKFIPEGSQRVGLVASQKNDLDAVALLHPDGSAVVVVLNRSSKDVPLTIKDPAVGFLETISPGYSIHTYLWRRQ

SEQ ID NO: 575 - DNA, 1614 bp, synthetic construct
  misc_feature 1..1614: note = Variant of B-Glucocerebrosidase
  source 1..1614: mol_type = other DNA
atggagttttcttctcctagtagagaagaatgccccaagccactgagcagggtgagcatcatggctggatccctcacagggctgcttcttttgcaggcagtctcatgggcctctggagccaggccctgtattcccaagtcattcggctactcctcagtggtgtgtgtatgcaatgccacctattgtgacagtttcgatcctccaactctccctgctctgggtaccttctcccggtatgagagcacaagaagtggaagacgcatggagctctcaatgggccctatacaggctaaccacactgggacaggtctgctgctgaccctccaacctgaacagaagtttcagaaagtcaagggatttggaggagccatgactgatgcagcagcactcaacatcttggccctgtctccaccagcccagaatctgctgttgaagtcctacttctcagaggaggggattggctacaacatcatccgggttcccatggctagctgtgacttctccattaggacctatacatacgctgacacccccgatgattttcagctccataatttcagtctccctgaagaagacaccaaactgaagatacctctgattcacagagccttgcaactgtcccaaaggccagtgagcctcttcgcttctccctggactagtcctacatggctgaagactaatggtgctgttaatgggaaaggctccctgaaaggacagccaggtgacatatatcatcagacatgggcccgctactttgtgaaattccttgatgcctatgcagagcacaagctccaattctgggcagtcaccgcagaaaacgagccctcagctgggctgctgtctggctacccctttcagtgcttgggctttactcctgagcatcaacgggacttcattgcccgggatttggggccaacactggccaacagcacccaccacaatgtaagactcctcatgctggatgaccagaggctgctgctccctcattgggccaaggtggtgttgacagacccagaagctgccaaatatgttcatggcatcgctgtccactggtacctggattttttggcccctgcaaaggctactctgggagagacccacagactcttccccaataccacgctgtttgcatcagaagcctgcgtggggagcaaattctgggagcagtctgttaggctgggttcctgggatcggggcatgcaatattcccatagtataataactaacctcctctaccacgtggtaggatggacagactggaatctggctttgaacccagaaggaggccccaattgggtgcgcaactttgttgacagccccatcattgtggatatcacaaaggacaccttctacaaacagcctatgttctatcatctggggcactttagcaagttcattccagagggttcccagagagtaggcttggttgcctcacagaagaatgatctggatgctgtggcactcctgcatcctgacgggagtgcagtggtggtagtactgaacaggtctagcaaagatgttcccttgactatcaaagacccagctgtgggctttctggaaaccatttcccctggatactctatccacacctatctctggagaagacagtaatga

SEQ ID NO: 576 - protein, 536 aa, synthetic construct
  REGION 1..536: note = Variant of B-Glucocerebrosidase
MEFSSPSREECPKPLSRVSIMAGSLTGLLLLQAVSWASGARPCIPKSFGYSSVVCVCNATYCDSFDPPTLPALGTFSRYESTRSGRRMELSMGPIQANHTGTGLLLTLQPEQKFQKVKGFGGAMTDAAALNILALSPPAQNLLLKSYFSEEGIGYNIIRVPMASCDFSIRTYTYADTPDDFQLHNFSLPEEDTKLKIPLIHRALQLSQRPVSLFASPWTSPTWLKTNGAVNGKGSLKGQPGDIYHQTWARYFVKFLDAYAEHKLQFWAVTAENEPSAGLLSGYPFQCLGFTPEHQRDFIARDLGPTLANSTHHNVRLLMLDDQRLLLPHWAKVVLTDPEAAKYVHGIAVHWYLDFLAPAKATLGETHRLFPNTTLFASEACVGSKFWEQSVRLGSWDRGMQYSHSIITNLLYHVVGWTDWNLALNPEGGPNWVRNFVDSPIIVDITKDTFYKQPMFYHLGHFSKFIPEGSQRVGLVASQKNDLDAVALLHPDGSAVVVVLNRSSKDVPLTIKDPAVGFLETISPGYSIHTYLWRRQ

SEQ ID NO: 577 - DNA, 1614 bp, synthetic construct
  misc_feature 1..1614: note = Variant of B-Glucocerebrosidase
  source 1..1614: mol_type = other DNA
atggagttttcttctcctagtagagaagaatgccccaagccactgagcagggtgagcatcatggctggatccctcacagggctgcttcttttgcaggcagtctcatgggcctctggagccaggccctgtattcccaagtcattcggctactcctcagtggtgtgtgtatgcaatgccacctattgtgacagtttcgatccttatactctccctgctctgggtaccttctcccggtatgagagcacaagaagtggaagacgcatggagctctcaatgggccctatacaggctaaccacactgggacaggtctgctgctgaccctccaacctgaacagaagtttcagaaagtcaagggatttggaggagccatgactgatgcagcagcactcaacatcttggccctgtctccaccagcccagaatctgctgttgaagtcctacttctcagaggaggggattggctacaacatcatccgggttcccatggctagctgtgacttctccattaggacctatacatacgctgacacccccgatgattttcagctccataatttcagtctccctgaagaagacaccaaactgaagatacctctgattcacagagccttgcaactgtcccaaaggccagtgagcctcttcgcttctccctggactagtcctacatggctgaagactaatggtgctgttaatgggaaaggctccctgaaaggacagccaggtgacatatatcatcagacatgggcccgctactttgtgaaattccttgatgcctatgcagagcacaagctccaattctgggcagtcaccgcagaaaacgagccctcagctgggctgctgtctggctacccctttcagtgcttgggctttactcctgagcatcaacgggacttcattgcccgggatttggggccaacactggccaacagcacccaccacaatgtaagactcctcatgctggatgaccagaggctgctgctccctcattgggccaaggtggtgttgacagacccagaagctgccaaatatgttcatggcatcgctgtccactggtacctggattttttggcccctgcaaaggctactctgggagagacccacagactcttccccaataccatgctgtttgcatcagaagcctgcgtggggagcaaattctgggagcagtctgttaggctgggttcctgggatcggggcatgcaatattcccatagtataataactaacctcctctaccacgtggtaggatggacagactggaatctggctttgaacccagaaggaggccccaattgggtgcgcaactttgttgacagccccatcattgtggatatcacaaaggacaccttctacaaacagcctatgttctatcatctggggcactttagcaagttcattccagagggttcccagagagtaggcttggttgcctcacagaagaatgatctggatgctgtggcactcctgcatcctgacgggagtgcagtggtggtagtactgaacaggtctagcaaagatgttcccttgactatcaaagacccagctgtgggctttctggaaaccatttcccctggatactctatccacacctatctctggagaagacagtaatga

SEQ ID NO: 578 - protein, 536 aa, synthetic construct
  REGION 1..536: note = Variant of B-Glucocerebrosidase
MEFSSPSREECPKPLSRVSIMAGSLTGLLLLQAVSWASGARPCIPKSFGYSSVVCVCNATYCDSFDPYTLPALGTFSRYESTRSGRRMELSMGPIQANHTGTGLLLTLQPEQKFQKVKGFGGAMTDAAALNILALSPPAQNLLLKSYFSEEGIGYNIIRVPMASCDFSIRTYTYADTPDDFQLHNFSLPEEDTKLKIPLIHRALQLSQRPVSLFASPWTSPTWLKTNGAVNGKGSLKGQPGDIYHQTWARYFVKFLDAYAEHKLQFWAVTAENEPSAGLLSGYPFQCLGFTPEHQRDFIARDLGPTLANSTHHNVRLLMLDDQRLLLPHWAKVVLTDPEAAKYVHGIAVHWYLDFLAPAKATLGETHRLFPNTMLFASEACVGSKFWEQSVRLGSWDRGMQYSHSIITNLLYHVVGWTDWNLALNPEGGPNWVRNFVDSPIIVDITKDTFYKQPMFYHLGHFSKFIPEGSQRVGLVASQKNDLDAVALLHPDGSAVVVVLNRSSKDVPLTIKDPAVGFLETISPGYSIHTYLWRRQ

SEQ ID NO: 579 - DNA, 1614 bp, synthetic construct
  misc_feature 1..1614: note = Variant of B-Glucocerebrosidase
  source 1..1614: mol_type = other DNA
atggagttttcttctcctagtagagaagaatgccccaagccactgagcagggtgagcatcatggctggatccctcacagggctgcttcttttgcaggcagtctcatgggcctctggagccaggccctgtattcccaagtcattcggctactcctcagtggtgtgtgtatgcaatgccacctattgtgacagtttcgatcctccaactctccctgctctgggtaccttctcccggtatgagagcacaagaagtggaagacgcatggagctctcaatgggccctttgcaggctaaccacactgggacaggtctgctgctgaccctccaacctgaacagaagtttcagaaagtcaagggatttggaggagccatgactgatgcagcagcactcaacatcttggccctgtctccaccagcccagaatctgctgttgaagtcctacttctcagaggaggggattggctacaacatcatccgggttcccatggctagctgtgacttctccattaggacctatacatacgctgacacccccgatgattttcagctccataatttcagtctccctgaagaagacaccaaactgaagatacctctgattcacagagccttgcaactgtcccaaaggccagtgagcctcttcgcttctccctggactagtcctacatggctgaagactaatggtgctgttaatgggaaaggctccctgaaaggacagccaggtgacatatatcatcagacatgggcccgctactttgtgaaattccttgatgcctatgcagagcacaagctccaattctgggcagtcaccgcagaaaacgagccctcagctgggctgctgtctggctacccctttcagtgcttgggctttactcctgagcatcaacgggacttcattgcccgggatttggggccaacactggccaacagcacccaccacaatgtaagactcctcatgctggatgaccagaggctgctgctccctcattgggccaaggtggtgttgacagacccagaagctgccaaatatgttcatggcatcgctgtccactggtacctggattttttggcccctgcaaaggctactctgggagagacccacagactcttccccaataccatgctgtttgcatcagaagcctgcgtggggagcaaattctgggagcagtctgttaggctgggttcctgggatcggggcatgcaatattcccatagtataataactaacctcctctaccacgtggtaggatggacagactggaatctggctttgaacccagaaggaggccccaattgggtgcgcaactttgttgacagccccatcattgtggatatcacaaaggacaccttctacaaacagcctatgttctatcatctggggcactttagcaagttcattccagagggttcccagagagtaggcttggttgcctcacagaagaatgatctggatgctgtggcactcctgcatcctgacgggagtgcagtggtggtagtactgaacaggtctagcaaagatgttcccttgactatcaaagacccagctgtgggctttctggaaaccatttcccctggatactctatccacacctatctctggagaagacagtaatga

SEQ ID NO: 580 - protein, 536 aa, synthetic construct
  REGION 1..536: note = Variant of B-Glucocerebrosidase
MEFSSPSREECPKPLSRVSIMAGSLTGLLLLQAVSWASGARPCIPKSFGYSSVVCVCNATYCDSFDPPTLPALGTFSRYESTRSGRRMELSMGPLQANHTGTGLLLTLQPEQKFQKVKGFGGAMTDAAALNILALSPPAQNLLLKSYFSEEGIGYNIIRVPMASCDFSIRTYTYADTPDDFQLHNFSLPEEDTKLKIPLIHRALQLSQRPVSLFASPWTSPTWLKTNGAVNGKGSLKGQPGDIYHQTWARYFVKFLDAYAEHKLQFWAVTAENEPSAGLLSGYPFQCLGFTPEHQRDFIARDLGPTLANSTHHNVRLLMLDDQRLLLPHWAKVVLTDPEAAKYVHGIAVHWYLDFLAPAKATLGETHRLFPNTMLFASEACVGSKFWEQSVRLGSWDRGMQYSHSIITNLLYHVVGWTDWNLALNPEGGPNWVRNFVDSPIIVDITKDTFYKQPMFYHLGHFSKFIPEGSQRVGLVASQKNDLDAVALLHPDGSAVVVVLNRSSKDVPLTIKDPAVGFLETISPGYSIHTYLWRRQ

SEQ ID NO: 581 - DNA, 1614 bp, synthetic construct
  misc_feature 1..1614: note = Variant of B-Glucocerebrosidase
  source 1..1614: mol_type = other DNA
atggagttttcttctcctagtagagaagaatgccccaagccactgagcagggtgagcatcatggctggatccctcacagggctgcttcttttgcaggcagtctcatgggcctctggagccaggccctgtattcccaagtcattcggctactcctcagtggtgtgtgtatgcaatgccacctattgtgacagtttcgatcctccaactctcggggctctgggtaccttctcccggtatgagagcacaagaagtggaagacgcatggagctctcaatgggccctatacaggctaaccacactgggacaggtctgctgctgaccctccaacctgaacagaagtttcagaaagtcaagggatttggaggagccatgactgatgcagcagcactcaacatcttggccctgtctccaccagcccagaatctgctgttgaagtcctacttctcagaggaggggattggctacaacatcatccgggttcccatggctagctgtgacttctccattaggacctatacatacgctgacacccccgatgattttcagctccataatttcagtctccctgaagaagacaccaaactgaagatacctctgattcacagagccttgcaactgtcccaaaggccagtgagcctcttcgcttctccctggactagtcctacatggctgaagactaatggtgctgttaatgggaaaggctccctgaaaggacagccaggtgacatatatcatcagacatgggcccgctactttgtgaaattccttgatgcctatgcagagcacaagctccaattctgggcagtcaccgcagaaaacgagccctcagctgggctgctgtctggctacccctttcagtgcttgggctttactcctgagcatcaacgggacttcattgcccgggatttggggccaacactggccaacagcacccaccacaatgtaagactcctcatgctggatgaccagaggctgctgctccctcattgggccaaggtggtgttgacagacccagaagctgccaaatatgttcatggcatcgctgtccactggtacctggattttttggcccctgcaaaggctactctgggagagacccacagactcttccccaataccatgctgtttgcatcagaagcctgcgtggggagcaaattctgggagcagtctgttaggctgggttcctgggatcggggcatgcaatattcccatagtataataactaacctcctctaccacgtggtaggatggacagactggaatctggctttgaacccagaaggaggccccaattgggtgcgcaactttgttgacagccccatcattgtggatatcacaaaggacaccttctacaaacagcctatgttctatcatctggggcactttagcaagttcattccagagggttcccagagagtaggcttggttgcctcacagaagaatgatctggatgctgtggcactcctgcatcctgacgggagtgcagtggtggtagtactgaacaggtctagcaaagatgttcccttgactatcaaagacccagctgtgggctttctggaaaccatttcccctggatactctatccacacctatctctggagaagacagtaatga

SEQ ID NO: 582 - protein, 536 aa, synthetic construct
  REGION 1..536: note = Variant of B-Glucocerebrosidase
MEFSSPSREECPKPLSRVSIMAGSLTGLLLLQAVSWASGARPCIPKSFGYSSVVCVCNATYCDSFDPPTLGALGTFSRYESTRSGRRMELSMGPIQANHTGTGLLLTLQPEQKFQKVKGFGGAMTDAAALNILALSPPAQNLLLKSYFSEEGIGYNIIRVPMASCDFSIRTYTYADTPDDFQLHNFSLPEEDTKLKIPLIHRALQLSQRPVSLFASPWTSPTWLKTNGAVNGKGSLKGQPGDIYHQTWARYFVKFLDAYAEHKLQFWAVTAENEPSAGLLSGYPFQCLGFTPEHQRDFIARDLGPTLANSTHHNVRLLMLDDQRLLLPHWAKVVLTDPEAAKYVHGIAVHWYLDFLAPAKATLGETHRLFPNTMLFASEACVGSKFWEQSVRLGSWDRGMQYSHSIITNLLYHVVGWTDWNLALNPEGGPNWVRNFVDSPIIVDITKDTFYKQPMFYHLGHFSKFIPEGSQRVGLVASQKNDLDAVALLHPDGSAVVVVLNRSSKDVPLTIKDPAVGFLETISPGYSIHTYLWRRQ

SEQ ID NO: 583 - DNA, 1614 bp, synthetic construct
  misc_feature 1..1614: note = Variant of B-Glucocerebrosidase
  source 1..1614: mol_type = other DNA
atggagttttcttctcctagtagagaagaatgccccaagccactgagcagggtgagcatcatggctggatccctcacagggctgcttcttttgcaggcagtctcatgggcctctggagccaggccctgtattcccaagtcattcggctactcctcagtggtgtgtgtatgcaatgccacctattgtgacagtttcgatcctccaactctccctgctctgggtaccttctcccggtatgagagcacaagaagtggaagacgcatggagctctcaatgggccctatacaggctaaccacactgggacaggtctgctgctgaccctccaacctgaacagaagtttcagaaagtcaagggatttggaggagccatgactgatgcagcagcactcaacatcttggccctgtctccaccagcccagaatctgctgttgaagtcctacttctcagaggaggggattggctacaacatcatccgggttcccatggctagctgtgacttctccattaggacctatacatacgctgacacccccgatgattttcagctccataatttcagtctccctgaagaagacaccaaactgaagatacctctgattcacagagccttgcaactgtcccaaaggccagtgagcctcttcgcttctccctggactagtcctacatggctgaagactaatggtgctgttaatgggaaaggctccctgaaaggacagccaggtgacatatatcatcagacatgggcccgctactttgtgaaattccttgatgcctatgcagagcacaagctccaattctgggcagtcaccgcagaaaacgagccctcagctgggctgctgtctggctacccctttcagtgcttgggctttactcctgagcatcaacgggacttcattgcccgggatttggggccaacactggccaacagcacccaccacaatgtaagactcctcatgctggatgaccagaggctgctgctccctcattgggccaaggtggtgttgacagacccagaagctgccaaatatgttcatggcatcgctgtccactggtacctggattttttggcccctgcaaaggctactctgggagagacccacagactcttccccaataccatgctgtttgcatcagaagcctgcgtggggagcaaattctgggagcagtctgttaggctgggttcctgggatcggggcatgcaatattcccatagtataataactaacctcctctaccacgtggtaggatggacagactggaatctggctttgaacccagaaggaggccccaattgggtgcgcaactttgttgacagccccatcattgtggatatcacaaaggacaccttctacaaacagcctatgttctatcatctggggcactttagcaagttcattccagagggttccgtgagagtaggcttggttgcctcacagaagaatgatctggatgctgtggcactcctgcatcctgacgggagtgcagtggtggtagtactgaacaggtctagcaaagatgttcccttgactatcaaagacccagctgtgggctttctggaaaccatttcccctggatactctatccacacctatctctggagaagacagtaatga

SEQ ID NO: 584 - protein, 536 aa, synthetic construct
  REGION 1..536: note = Variant of B-Glucocerebrosidase
MEFSSPSREECPKPLSRVSIMAGSLTGLLLLQAVSWASGARPCIPKSFGYSSVVCVCNATYCDSFDPPTLPALGTFSRYESTRSGRRMELSMGPIQANHTGTGLLLTLQPEQKFQKVKGFGGAMTDAAALNILALSPPAQNLLLKSYFSEEGIGYNIIRVPMASCDFSIRTYTYADTPDDFQLHNFSLPEEDTKLKIPLIHRALQLSQRPVSLFASPWTSPTWLKTNGAVNGKGSLKGQPGDIYHQTWARYFVKFLDAYAEHKLQFWAVTAENEPSAGLLSGYPFQCLGFTPEHQRDFIARDLGPTLANSTHHNVRLLMLDDQRLLLPHWAKVVLTDPEAAKYVHGIAVHWYLDFLAPAKATLGETHRLFPNTMLFASEACVGSKFWEQSVRLGSWDRGMQYSHSIITNLLYHVVGWTDWNLALNPEGGPNWVRNFVDSPIIVDITKDTFYKQPMFYHLGHFSKFIPEGSVRVGLVASQKNDLDAVALLHPDGSAVVVVLNRSSKDVPLTIKDPAVGFLETISPGYSIHTYLWRRQ

SEQ ID NO: 585 - DNA, 1614 bp, synthetic construct
  misc_feature 1..1614: note = Variant of B-Glucocerebrosidase
  source 1..1614: mol_type = other DNA
atggagttttcttctcctagtagagaagaatgccccaagccactgagcagggtgagcatcatggctggatccctcacagggctgcttcttttgcaggcagtctcatgggcctctggagccaggccctgtattcccaagtcattcggctactcctcagtggtgtgtgtatgcaatgccacctattgtgacagtttcgatcctccaactctccctgctctgggtaccttctcccggtatgagagcacaagaagtggaagacgcatggagctctcaatgggccctatacaggctaaccacactgggacaggtctgctgctgatgctccaacctgaacagaagtttcagaaagtcaagggatttggaggagccatgactgatgcagcagcactcaacatcttggccctgtctccaccagcccagaatctgctgttgaagtcctacttctcagaggaggggattggctacaacatcatccgggttcccatggctagctgtgacttctccattaggacctatacatacgctgacacccccgatgattttcagctccataatttcagtctccctgaagaagacaccaaactgaagatacctctgattcacagagccttgcaactgtcccaaaggccagtgagcctcttcgcttctccctggactagtcctacatggctgaagactaatggtgctgttaatgggaaaggctccctgaaaggacagccaggtgacatatatcatcggacatgggcccgctactttgtgaaattccttgatgcctatgcagagcacaagctccaattctgggcagtcaccgcagaaaacgagccctcagctgggctgctgtctggctacccctttcagtgcttgggctttactcctgagcatcaacgggacttcattgcccgggatttggggccaacactggccaacagcacccaccacaatgtaagactcctcatgctggatgaccagaggctgctgctccctcattgggccaaggtggtgttgacagacccagaagctgccaaatatgttcatggcatcgctgtccactggtacctggattttttggcccctgcaaaggctactctgggagagacccacagactcttccccaataccatgctgtttgcatcagaagcctgcgtggggagcaaattctgggagcagtctgttaggctgggttcctgggatcggggcatgcaatattcccatagtataataactaacctcctctaccacgtggtaggatggacagactggaatctggctttgaacccagaaggaggccccaattgggtgcgcaactttgttgacagccccatcattgtggatatcacaaaggacaccttctacaaacagcctatgttctatcatctggggcactttagcaagttcattccagagggttcccagagagtaggcttggttgcctcacagaagaatgatctggatgctgtggcactcctgcatcctgacgggagtgcagtggtggtagtactgaacaggtctagcaaagatgttcccttgactatcaaagacccagctgtgggctttctggaaaccatttcccctggatactctatccacacctatctctggagaagacagtaatga

SEQ ID NO: 586 - protein, 536 aa, synthetic construct
  REGION 1..536: note = Variant of B-Glucocerebrosidase
MEFSSPSREECPKPLSRVSIMAGSLTGLLLLQAVSWASGARPCIPKSFGYSSVVCVCNATYCDSFDPPTLPALGTFSRYESTRSGRRMELSMGPIQANHTGTGLLLMLQPEQKFQKVKGFGGAMTDAAALNILALSPPAQNLLLKSYFSEEGIGYNIIRVPMASCDFSIRTYTYADTPDDFQLHNFSLPEEDTKLKIPLIHRALQLSQRPVSLFASPWTSPTWLKTNGAVNGKGSLKGQPGDIYHRTWARYFVKFLDAYAEHKLQFWAVTAENEPSAGLLSGYPFQCLGFTPEHQRDFIARDLGPTLANSTHHNVRLLMLDDQRLLLPHWAKVVLTDPEAAKYVHGIAVHWYLDFLAPAKATLGETHRLFPNTMLFASEACVGSKFWEQSVRLGSWDRGMQYSHSIITNLLYHVVGWTDWNLALNPEGGPNWVRNFVDSPIIVDITKDTFYKQPMFYHLGHFSKFIPEGSQRVGLVASQKNDLDAVALLHPDGSAVVVVLNRSSKDVPLTIKDPAVGFLETISPGYSIHTYLWRRQ

SEQ ID NO: 587 - DNA, 1614 bp, synthetic construct
  misc_feature 1..1614: note = Variant of B-Glucocerebrosidase
  source 1..1614: mol_type = other DNA
atggagttttcttctcctagtagagaagaatgccccaagccactgagcagggtgagcatcatggctggatccctcacagggctgcttcttttgcaggcagtctcatgggcctctggagccaggccctgtattcccaagtcattcggctactcctcagtggtgtgtgtatgcaatgccacctattgtgacagtttcgatcctccaactctccctgctctgggtaccttctcccggtatgagagcacaagaagtggaagacgcatggagctctcaatgggccctatacaggctaaccacactgggacaggtctgctgctgaccctccaagcggaacagaagtttcagaaagtcaagggatttggaggagccatgactgatgcagcagcactcaacatcttggccctgtctccaccagcccagaatctgctgttgaagtcctacttctcagaggaggggattggctacaacatcatccgggttcccatggctagctgtgacttctccattaggacctatacatacgctgacacccccgatgattttcagctccataatttcagtctccctgaagaagacaccaaactgaagatacctctgattcacagagccttgcaactgtcccaaaggccagtgagcctcttcgcttctccctggactagtcctacatggctgaagactaatggtgctgttaatgggaaaggctccctgaaaggacagccaggtgacatatatcatcagacatgggcccgctactttgtgaaattccttgatgcctatgcagagcacaagctccaattctgggcagtcaccgcagaaaacgagccctcagctgggctgctgtctggctacccctttcagtgcttgggctttactcctgagcatcaacgggacttcattgcccgggatttggggccaacactggccaacagcacccaccacaatgtaagactcctcatgctggatgaccagaggctgctgctccctcattgggccaaggtggtgttgacagacccagaagctgccaaatatgttcatggcatcgctgtccactggtacctggattttttggcccctgcaaaggctactctgggagagacccacagactcttccccaataccatgctgtttgcatcagaagcctgcgtggggagcaaattctgggagcagtctgttaggctgggttcctgggatcggggcatgcaatattcccatagtataataactaacctcctctaccacgtggtaggatggacagactggaatctggctttgaacccagaaggaggccccaattgggtgcgcaactttgttgacagccccatcattgtggatatcacaaaggacaccttctacaaacagcctatgttctatcatctggggcactttagcaagttcattccagagggttcccagagagtaggcttggttgcctcacagaagaatgatctggatgctgtggcactcctgcatcctgacgggagtgcagtggtggtagtactgaacaggtctagcaaagatgttcccttgactatcaaagacccagctgtgggctttctggaaaccatttcccctggatactctatccacacctatctctggagaagacagtaatga

SEQ ID NO: 588 - protein, 536 aa, synthetic construct
  REGION 1..536: note = Variant of B-Glucocerebrosidase
MEFSSPSREECPKPLSRVSIMAGSLTGLLLLQAVSWASGARPCIPKSFGYSSVVCVCNATYCDSFDPPTLPALGTFSRYESTRSGRRMELSMGPIQANHTGTGLLLTLQAEQKFQKVKGFGGAMTDAAALNILALSPPAQNLLLKSYFSEEGIGYNIIRVPMASCDFSIRTYTYADTPDDFQLHNFSLPEEDTKLKIPLIHRALQLSQRPVSLFASPWTSPTWLKTNGAVNGKGSLKGQPGDIYHQTWARYFVKFLDAYAEHKLQFWAVTAENEPSAGLLSGYPFQCLGFTPEHQRDFIARDLGPTLANSTHHNVRLLMLDDQRLLLPHWAKVVLTDPEAAKYVHGIAVHWYLDFLAPAKATLGETHRLFPNTMLFASEACVGSKFWEQSVRLGSWDRGMQYSHSIITNLLYHVVGWTDWNLALNPEGGPNWVRNFVDSPIIVDITKDTFYKQPMFYHLGHFSKFIPEGSQRVGLVASQKNDLDAVALLHPDGSAVVVVLNRSSKDVPLTIKDPAVGFLETISPGYSIHTYLWRRQ

SEQ ID NO: 589 - DNA, 1614 bp, synthetic construct
  misc_feature 1..1614: note = Variant of B-Glucocerebrosidase
  source 1..1614: mol_type = other DNA
atggagttttcttctcctagtagagaagaatgccccaagccactgagcagggtgagcatcatggctggatccctcacagggctgcttcttttgcaggcagtctcatgggcctctggagccaggccctgtattcccaagtcattcggctactcctcagtggtgtgtgtatgcaatgccacctattgtgacagtttcgatcctccaactctccctgctctgggtaccttctcccggtatgagagcacaagaagtggaagacgcatggagctctcaatgggccctatacaggctaaccacactgggacaggtctgctgctgaccctccaacctgaacagaagtttcagaaagtcaagggatttggaggagccatgactgatgcagcagcactcaacatcttggccctgtctccaccagcccagaattatctgttgaagtcctacttctcagaggaggggattggctacaacatcatccgggttcccatggctagctgtgacttctccattaggacctatacatacgctgacacccccgatgattttcagctccataatttcagtctccctgaagaagacaccaaactgaagatacctctgattcacagagccttgcaactgtcccaaaggccagtgagcctcttcgcttctccctggactagtcctacatggctgaagactaatggtgctgttaatgggaaaggctccctgaaaggacagccaggtgacatatatcatcagacatgggcccgctactttgtgaaattccttgatgcctatgcagagcacaagctccaattctgggcagtcaccgcagaaaacgagccctcagctgggctgctgtctggctacccctttcagtgcttgggctttactcctgagcatcaacgggacttcattgcccgggatttggggccaacactggccaacagcacccaccacaatgtaagactcctcatgctggatgaccagaggctgctgctccctcattgggccaaggtggtgttgacagacccagaagctgccaaatatgttcatggcatcgctgtccactggtacctggattttttggcccctgcaaaggctactctgggagagacccacagactcttccccaataccatgctgtttgcatcagaagcctgcgtggggagcaaattctgggagcagtctgttaggctgggttcctgggatcggggcatgcaatattcccatagtataataactaacctcctctaccacgtggtaggatggacagactggaatctggctttgaacccagaaggaggccccaattgggtgcgcaactttgttgacagccccatcattgtggatatcacaaaggacaccttctacaaacagcctatgttctatcatctggggcactttagcaagttcattccagagggttcccagagagtaggcttggttgcctcacagaagaatgatctggatgctgtggcactcctgcatcctgacgggagtgcagtggtggtagtactgaacaggtctagcaaagatgttcccttgactatcaaagacccagctgtgggctttctggaaaccatttcccctggatactctatccacacctatctctggagaagacagtaatga

SEQ ID NO: 590 - protein, 536 aa, synthetic construct
  REGION 1..536: note = Variant of B-Glucocerebrosidase
MEFSSPSREECPKPLSRVSIMAGSLTGLLLLQAVSWASGARPCIPKSFGYSSVVCVCNATYCDSFDPPTLPALGTFSRYESTRSGRRMELSMGPIQANHTGTGLLLTLQPEQKFQKVKGFGGAMTDAAALNILALSPPAQNYLLKSYFSEEGIGYNIIRVPMASCDFSIRTYTYADTPDDFQLHNFSLPEEDTKLKIPLIHRALQLSQRPVSLFASPWTSPTWLKTNGAVNGKGSLKGQPGDIYHQTWARYFVKFLDAYAEHKLQFWAVTAENEPSAGLLSGYPFQCLGFTPEHQRDFIARDLGPTLANSTHHNVRLLMLDDQRLLLPHWAKVVLTDPEAAKYVHGIAVHWYLDFLAPAKATLGETHRLFPNTMLFASEACVGSKFWEQSVRLGSWDRGMQYSHSIITNLLYHVVGWTDWNLALNPEGGPNWVRNFVDSPIIVDITKDTFYKQPMFYHLGHFSKFIPEGSQRVGLVASQKNDLDAVALLHPDGSAVVVVLNRSSKDVPLTIKDPAVGFLETISPGYSIHTYLWRRQ

SEQ ID NO: 591 - DNA, 1614 bp, synthetic construct
  misc_feature 1..1614: note = Variant of B-Glucocerebrosidase
  source 1..1614: mol_type = other DNA
atggagttttcttctcctagtagagaagaatgccccaagccactgagcagggtgagcatcatggctggatccctcacagggctgcttcttttgcaggcagtctcatgggcctctggagccaggccctgtattcccaagtcattcggctactcctcagtggtgtgtgtatgcaatgccacctattgtgacagtgtggatcctccaactctccctgctctgggtaccttctcccggtatgagagcacaagaagtggaagacgcatggagctctcaatgggccctatacaggctaaccacactgggacaggtctgctgctgaccctccaacctgaacagaagtttcagaaagtcaagggatttggaggagccatgactgatgcagcagcactcaacatcttggccctgtctccaccagcccagaatctgctgttgaagtcctacttctcagaggaggggattggctacaacatcatccgggttcccatggctagctgtgacttctccattaggacctatacatacgctgacacccccgatgattttcagctccataatttcagtctccctgaagaagacaccaaactgaagatacctctgattcacagagccttgcaactgtcccaaaggccagtgagcctcttcgcttctccctggactagtcctacatggctgaagactaatggtgctgttaatgggaaaggctccctgaaaggacagccaggtgacatatatcatcagacatgggcccgctactttgtgaaattccttgatgcctatgcagagcacaagctccaattctgggcagtcaccgcagaaaacgagccctcagctgggctgctgtctggctacccctttcagtgcttgggctttactcctgagcatcaacgggacttcattgcccgggatttggggccaacactggccaacagcacccaccacaatgtaagactcctcatgctggatgaccagaggctgctgctccctcattgggccaaggtggtgttgacagacccagaagctgccaaatatgttcatggcatcgctgtccactggtacctggattttttggcccctgcaaaggctactctgggagagacccacagactcttccccaataccatgctgtttgcatcagaagcctgcgtggggagcaaattctgggagcagtctgttaggctgggttcctgggatcggggcatgcaatattcccatagtataataactaacctcctctaccacgtggtaggatggacagactggaatctggctttgaacccagaaggaggccccaattgggtgcgcaactttgttgacagccccatcattgtggatatcacaaaggacaccttctacaaacagcctatgttctatcatctggggcactttagcaagttcattccagagggttcccagagagtaggcttggttgcctcacagaagaatgatctggatgctgtggcactcctgcatcctgacgggagtgcagtggtggtagtactgaacaggtctagcaaagatgttcccttgactatcaaagacccagctgtgggctttctggaaaccatttcccctggatactctatccacacctatctctggagaagacagtaatga

SEQ ID NO: 592 - protein, 536 aa, synthetic construct
  REGION 1..536: note = Variant of B-Glucocerebrosidase
MEFSSPSREECPKPLSRVSIMAGSLTGLLLLQAVSWASGARPCIPKSFGYSSVVCVCNATYCDSVDPPTLPALGTFSRYESTRSGRRMELSMGPIQANHTGTGLLLTLQPEQKFQKVKGFGGAMTDAAALNILALSPPAQNLLLKSYFSEEGIGYNIIRVPMASCDFSIRTYTYADTPDDFQLHNFSLPEEDTKLKIPLIHRALQLSQRPVSLFASPWTSPTWLKTNGAVNGKGSLKGQPGDIYHQTWARYFVKFLDAYAEHKLQFWAVTAENEPSAGLLSGYPFQCLGFTPEHQRDFIARDLGPTLANSTHHNVRLLMLDDQRLLLPHWAKVVLTDPEAAKYVHGIAVHWYLDFLAPAKATLGETHRLFPNTMLFASEACVGSKFWEQSVRLGSWDRGMQYSHSIITNLLYHVVGWTDWNLALNPEGGPNWVRNFVDSPIIVDITKDTFYKQPMFYHLGHFSKFIPEGSQRVGLVASQKNDLDAVALLHPDGSAVVVVLNRSSKDVPLTIKDPAVGFLETISPGYSIHTYLWRRQ

SEQ ID NO: 593 - DNA, 1614 bp, synthetic construct
  misc_feature 1..1614: note = Variant of B-Glucocerebrosidase
  source 1..1614: mol_type = other DNA
atggagttttcttctcctagtagagaagaatgccccaagccactgagcagggtgagcatcatggctggatccctcacagggctgcttcttttgcaggcagtctcatgggcctctggagccaggccctgtattcccaagtcattcggctactcctcagtggtgtgtgtatgcaatgccacctattgtgacagtttcgatcctccaactctcatggctctgggtaccttctcccggtatgagagcacaagaagtggaagacgcatggagctctcaatgggccctatacaggctaaccacactgggacaggtctgctgctgaccctccaacctgaacagaagtttcagaaagtcaagggatttggaggagccatgactgatgcagcagcactcaacatcttggccctgtctccaccagcccagaatctgctgttgaagtcctacttctcagaggaggggattggctacaacatcatccgggttcccatggctagctgtgacttctccattaggacctatacatacgctgacacccccgatgattttcagctccataatttcagtctccctgaagaagacaccaaactgaagatacctctgattcacagagccttgcaactgtcccaaaggccagtgagcctcttcgcttctccctggactagtcctacatggctgaagactaatggtgctgttaatgggaaaggctccctgaaaggacagccaggtgacatatatcatcagacatgggcccgctactttgtgaaattccttgatgcctatgcagagcacaagctccaattctgggcagtcaccgcagaaaacgagccctcagctgggctgctgtctggctacccctttcagtgcttgggctttactcctgagcatcaacgggacttcattgcccgggatttggggccaacactggccaacagcacccaccacaatgtaagactcctcatgctggatgaccagaggctgctgctccctcattgggccaaggtggtgttgacagacccagaagctgccaaatatgttcatggcatcgctgtccactggtacctggattttttggcccctgcaaaggctactctgggagagacccacagactcttccccaataccatgctgtttgcatcagaagcctgcgtggggagcaaattctgggagcagtctgttaggctgggttcctgggatcggggcatgcaatattcccatagtataataactaacctcctctaccacgtggtaggatggacagactggaatctggctttgaacccagaaggaggccccaattgggtgcgcaactttgttgacagccccatcattgtggatatcacaaaggacaccttctacaaacagcctatgttctatcatctggggcactttagcaagttcattccagagggttcccagagagtaggcttggttgcctcacagaagaatgatctggatgctgtggcactcctgcatcctgacgggagtgcagtggtggtagtactgaacaggtctagcaaagatgttcccttgactatcaaagacccagctgtgggctttctggaaaccatttcccctggatactctatccacacctatctctggagaagacagtaatga

SEQ ID NO: 594 - protein, 536 aa, synthetic construct
  REGION 1..536: note = Variant of B-Glucocerebrosidase
MEFSSPSREECPKPLSRVSIMAGSLTGLLLLQAVSWASGARPCIPKSFGYSSVVCVCNATYCDSFDPPTLMALGTFSRYESTRSGRRMELSMGPIQANHTGTGLLLTLQPEQKFQKVKGFGGAMTDAAALNILALSPPAQNLLLKSYFSEEGIGYNIIRVPMASCDFSIRTYTYADTPDDFQLHNFSLPEEDTKLKIPLIHRALQLSQRPVSLFASPWTSPTWLKTNGAVNGKGSLKGQPGDIYHQTWARYFVKFLDAYAEHKLQFWAVTAENEPSAGLLSGYPFQCLGFTPEHQRDFIARDLGPTLANSTHHNVRLLMLDDQRLLLPHWAKVVLTDPEAAKYVHGIAVHWYLDFLAPAKATLGETHRLFPNTMLFASEACVGSKFWEQSVRLGSWDRGMQYSHSIITNLLYHVVGWTDWNLALNPEGGPNWVRNFVDSPIIVDITKDTFYKQPMFYHLGHFSKFIPEGSQRVGLVASQKNDLDAVALLHPDGSAVVVVLNRSSKDVPLTIKDPAVGFLETISPGYSIHTYLWRRQ

SEQ ID NO: 595 - DNA, 1614 bp, synthetic construct
  misc_feature 1..1614: note = Variant of B-Glucocerebrosidase
  source 1..1614: mol_type = other DNA
atggagttttcttctcctagtagagaagaatgccccaagccactgagcagggtgagcatcatggctggatccctcacagggctgcttcttttgcaggcagtctcatgggcctctggagccaggccctgtattcccaagtcattcggctactcctcagtggtgtgtgtatgcaatgccacctattgtgacagtttcgatcctccaactctccctgctctgggtaccttcggtcggtatgagagcacaagaagtggaagacgcatggagctctcaatgggccctatacaggctaaccacactgggacaggtctgctgctgaccctccaacctgaacagaagtttcagaaagtcaagggatttggaggagccatgactgatgcagcagcactcaacatcttggccctgtctccaccagcccagaatctgctgttgaagtcctacttctcagaggaggggattggctacaacatcatccgggttcccatggctagctgtgacttctccattaggacctatacatacgctgacacccccgatgattttcagctccataatttcagtctccctgaagaagacaccaaactgaagatacctctgattcacagagccttgcaactgtcccaaaggccagtgagcctcttcgcttctccctggactagtcctacatggctgaagactaatggtgctgttaatgggaaaggctccctgaaaggacagccaggtgacatatatcatcagacatgggcccgctactttgtgaaattccttgatgcctatgcagagcacaagctccaattctgggcagtcaccgcagaaaacgagccctcagctgggctgctgtctggctacccctttcagtgcttgggctttactcctgagcatcaacgggacttcattgcccgggatttggggccaacactggccaacagcacccaccacaatgtaagactcctcatgctggatgaccagaggctgctgctccctcattgggccaaggtggtgttgacagacccagaagctgccaaatatgttcatggcatcgctgtccactggtacctggattttttggcccctgcaaaggctactctgggagagacccacagactcttccccaataccatgctgtttgcatcagaagcctgcgtggggagcaaattctgggagcagtctgttaggctgggttcctgggatcggggcatgcaatattcccatagtataataactaacctcctctaccacgtggtaggatggacagactggaatctggctttgaacccagaaggaggccccaattgggtgcgcaactttgttgacagccccatcattgtggatatcacaaaggacaccttctacaaacagcctatgttctatcatctggggcactttagcaagttcattccagagggttcccagagagtaggcttggttgcctcacagaagaatgatctggatgctgtggcactcctgcatcctgacgggagtgcagtggtggtagtactgaacaggtctagcaaagatgttcccttgactatcaaagacccagctgtgggctttctggaaaccatttcccctggatactctatccacacctatctctggagaagacagtaatga

SEQ ID NO: 596 - protein, 536 aa, synthetic construct
  REGION 1..536: note = Variant of B-Glucocerebrosidase
MEFSSPSREECPKPLSRVSIMAGSLTGLLLLQAVSWASGARPCIPKSFGYSSVVCVCNATYCDSFDPPTLPALGTFGRYESTRSGRRMELSMGPIQANHTGTGLLLTLQPEQKFQKVKGFGGAMTDAAALNILALSPPAQNLLLKSYFSEEGIGYNIIRVPMASCDFSIRTYTYADTPDDFQLHNFSLPEEDTKLKIPLIHRALQLSQRPVSLFASPWTSPTWLKTNGAVNGKGSLKGQPGDIYHQTWARYFVKFLDAYAEHKLQFWAVTAENEPSAGLLSGYPFQCLGFTPEHQRDFIARDLGPTLANSTHHNVRLLMLDDQRLLLPHWAKVVLTDPEAAKYVHGIAVHWYLDFLAPAKATLGETHRLFPNTMLFASEACVGSKFWEQSVRLGSWDRGMQYSHSIITNLLYHVVGWTDWNLALNPEGGPNWVRNFVDSPIIVDITKDTFYKQPMFYHLGHFSKFIPEGSQRVGLVASQKNDLDAVALLHPDGSAVVVVLNRSSKDVPLTIKDPAVGFLETISPGYSIHTYLWRRQ

SEQ ID NO: 597 - DNA, 1614 bp, synthetic construct
  misc_feature 1..1614: note = Variant of B-Glucocerebrosidase
  source 1..1614: mol_type = other DNA
atggagttttcttctcctagtagagaagaatgccccaagccactgagcagggtgagcatcatggctggatccctcacagggctgcttcttttgcaggcagtctcatgggcctctggagccaggccctgtattcccaagtcattcggctactcctcagtggtgtgtgtatgcaatgccacctattgtgacagtttcgatcctccaactctccctgctctgggtaccttcaggcggtatgagagcacaagaagtggaagacgcatggagctctcaatgggccctatacaggctaaccacactgggacaggtctgctgctgaccctccaacctgaacagaagtttcagaaagtcaagggatttggaggagccatgactgatgcagcagcactcaacatcttggccctgtctccaccagcccagaatctgctgttgaagtcctacttctcagaggaggggattggctacaacatcatccgggttcccatggctagctgtgacttctccattaggacctatacatacgctgacacccccgatgattttcagctccataatttcagtctccctgaagaagacaccaaactgaagatacctctgattcacagagccttgcaactgtcccaaaggccagtgagcctcttcgcttctccctggactagtcctacatggctgaagactaatggtgctgttaatgggaaaggctccctgaaaggacagccaggtgacatatatcatcagacatgggcccgctactttgtgaaattccttgatgcctatgcagagcacaagctccaattctgggcagtcaccgcagaaaacgagccctcagctgggctgctgtctggctacccctttcagtgcttgggctttactcctgagcatcaacgggacttcattgcccgggatttggggccaacactggccaacagcacccaccacaatgtaagactcctcatgctggatgaccagaggctgctgctccctcattgggccaaggtggtgttgacagacccagaagctgccaaatatgttcatggcatcgctgtccactggtacctggattttttggcccctgcaaaggctactctgggagagacccacagactcttccccaataccatgctgtttgcatcagaagcctgcgtggggagcaaattctgggagcagtctgttaggctgggttcctgggatcggggcatgcaatattcccatagtataataactaacctcctctaccacgtggtaggatggacagactggaatctggctttgaacccagaaggaggccccaattgggtgcgcaactttgttgacagccccatcattgtggatatcacaaaggacaccttctacaaacagcctatgttctatcatctggggcactttagcaagttcattccagagggttcccagagagtaggcttggttgcctcacagaagaatgatctggatgctgtggcactcctgcatcctgacgggagtgcagtggtggtagtactgaacaggtctagcaaagatgttcccttgactatcaaagacccagctgtgggctttctggaaaccatttcccctggatactctatccacacctatctctggagaagacagtaatga

SEQ ID NO: 598 - protein, 536 aa, synthetic construct
  REGION 1..536: note = Variant of B-Glucocerebrosidase
MEFSSPSREECPKPLSRVSIMAGSLTGLLLLQAVSWASGARPCIPKSFGYSSVVCVCNATYCDSFDPPTLPALGTFRRYESTRSGRRMELSMGPIQANHTGTGLLLTLQPEQKFQKVKGFGGAMTDAAALNILALSPPAQNLLLKSYFSEEGIGYNIIRVPMASCDFSIRTYTYADTPDDFQLHNFSLPEEDTKLKIPLIHRALQLSQRPVSLFASPWTSPTWLKTNGAVNGKGSLKGQPGDIYHQTWARYFVKFLDAYAEHKLQFWAVTAENEPSAGLLSGYPFQCLGFTPEHQRDFIARDLGPTLANSTHHNVRLLMLDDQRLLLPHWAKVVLTDPEAAKYVHGIAVHWYLDFLAPAKATLGETHRLFPNTMLFASEACVGSKFWEQSVRLGSWDRGMQYSHSIITNLLYHVVGWTDWNLALNPEGGPNWVRNFVDSPIIVDITKDTFYKQPMFYHLGHFSKFIPEGSQRVGLVASQKNDLDAVALLHPDGSAVVVVLNRSSKDVPLTIKDPAVGFLETISPGYSIHTYLWRRQ

SEQ ID NO: 599 - DNA, 1614 bp, synthetic construct
  misc_feature 1..1614: note = Variant of B-Glucocerebrosidase
  source 1..1614: mol_type = other DNA
atggagttttcttctcctagtagagaagaatgccccaagccactgagcagggtgagcatcatggctggatccctcacagggctgcttcttttgcaggcagtctcatgggcctctggagccaggccctgtattcccaagtcattcggctactcctcagtggtgtgtgtatgcaatgccacctattgtgacagtttcgatcctccaactctccctgctctgggtaccttctcccggtatgagagcacaagaagtggaagacgcatggagctctcaatgggccctatacaggctaaccacactgggacaggtctgctgctgaccctccaacctgaacagaagtttcagaaagtcaagggatttggaggagccatgactgatgcagcagcactcaacatcttggccctgtctccaccagcccagaatctgctgttgaagtcctacttctcagaggaggggattggctacaacatcatccgggttcccatggctagctgtgacttctccattaggacctatacatacgctgacacccccgatgattttcagctccataatttcagtctccctgaagaagacaccaaactgaagatacctctgattcacagagccttgcaactgtcccaaaggccagtgagcctcttcgcttctccctggactagtcctacatggctgaagactaatggtgcttataatgggaaaggctccctgaaaggacagccaggtgacatatatcatcagacatgggcccgctactttgtgaaattccttgatgcctatgcagagcacaagctccaattctgggcagtcaccgcagaaaacgagccctcagctgggctgctgtctggctacccctttcagtgcttgggctttactcctgagcatcaacgggacttcattgcccgggatttggggccaacactggccaacagcacccaccacaatgtaagactcctcatgctggatgaccagaggctgctgctccctcattgggccaaggtggtgttgacagacccagaagctgccaaatatgttcatggcatcgctgtccactggtacctggattttttggcccctgcaaaggctactctgggagagacccacagactcttccccaataccatgctgtttgcatcagaagcctgcgtggggagcaaattctgggagcagtctgttaggctgggttcctgggatcggggcatgcaatattcccatagtataataactaacctcctctaccacgtggtaggatggacagactggaatctggctttgaacccagaaggaggccccaattgggtgcgcaactttgttgacagccccatcattgtggatatcacaaaggacaccttctacaaacagcctatgttctatcatctggggcactttagcaagttcattccagagggttcccagagagtaggcttggttgcctcacagaagaatgatctggatgctgtggcactcctgcatcctgacgggagtgcagtggtggtagtactgaacaggtctagcaaagatgttcccttgactatcaaagacccagctgtgggctttctggaaaccatttcccctggatactctatccacacctatctctggagaagacagtaatga

SEQ ID NO: 600 - protein, 536 aa, synthetic construct
  REGION 1..536: note = Variant of B-Glucocerebrosidase
MEFSSPSREECPKPLSRVSIMAGSLTGLLLLQAVSWASGARPCIPKSFGYSSVVCVCNATYCDSFDPPTLPALGTFSRYESTRSGRRMELSMGPIQANHTGTGLLLTLQPEQKFQKVKGFGGAMTDAAALNILALSPPAQNLLLKSYFSEEGIGYNIIRVPMASCDFSIRTYTYADTPDDFQLHNFSLPEEDTKLKIPLIHRALQLSQRPVSLFASPWTSPTWLKTNGAYNGKGSLKGQPGDIYHQTWARYFVKFLDAYAEHKLQFWAVTAENEPSAGLLSGYPFQCLGFTPEHQRDFIARDLGPTLANSTHHNVRLLMLDDQRLLLPHWAKVVLTDPEAAKYVHGIAVHWYLDFLAPAKATLGETHRLFPNTMLFASEACVGSKFWEQSVRLGSWDRGMQYSHSIITNLLYHVVGWTDWNLALNPEGGPNWVRNFVDSPIIVDITKDTFYKQPMFYHLGHFSKFIPEGSQRVGLVASQKNDLDAVALLHPDGSAVVVVLNRSSKDVPLTIKDPAVGFLETISPGYSIHTYLWRRQ

SEQ ID NO: 601 - DNA, 1614 bp, synthetic construct
  misc_feature 1..1614: note = Variant of B-Glucocerebrosidase
  source 1..1614: mol_type = other DNA
atggagttttcttctcctagtagagaagaatgccccaagccactgagcagggtgagcatcatggctggatccctcacagggctgcttcttttgcaggcagtctcatgggcctctggagccaggccctgtattcccaagtcattcggctactcctcagtggtgtgtgtatgcaatgccacctattgtgacagtttcgatcctccaactctccctgctctgggtaccttctcccggtatgagagcacaagaagtggaagacgcatggagctctcaatgggccctatacaggctaaccacactgggacaggtctgctgctgaccctccaacctgaacagaagtttcagaaagtcaagggatttggaggagccatgactgatgcagcagcactcaacatcttggccctgtctccaccagcccagaatctgctgttgaagtcctacttctcagaggaggggattggctacaacatcatccgggttcccatggctagctgtgacttctccattaggacctatacatacgctgacacccccgatgattttcagctccataatttcagtctccctgaagaagacaccaaactgaagatacctctgattcacagagccttgcaactgtcccaaaggccagtgagcctcttcgcttctccctggactagtcctacatggctgaagactaatggtgctgttaatgggaaaggctccctgaaaggacagccaggtgacatatatcatcagacatgggcccgctactttgtgaaattccttgatgcctatgcagagcacaagctccaattctgggcagtcaccgcagaaaacgagccctcagctgggctgctgtctggctacccctttcagtgcttgggctttactcctgagcatcaacgggacttcattgcccgggatttggggccaacactggccaacagcacccaccacaatgtaagactcctcatgctggatgaccagaggctgctgctccctcattgggccaaggtggtgttgacagacccagaagctgccaaatatgttcatggcatcgctgtccactggtacctggattttttggcccctgcaaaggctactctgggagagacccacagactcttccccaataccatgctgtttgcatcagaagcctgcgtggggagcaaattctgggagcagtctgttaggctgggttcctgggatcggggcatgcaatattcccatagtataataactaacctcctctaccacgtggtaggatggacagactggaatctggctttgaacccagaaggaggccccaattgggtgcgcaactttgttgacagccccatcattgtggatatcacaaaggacaccttctacaaacagcctatgttctatcatctggggcactttagcaagttcattccagagggttcccagagagtaggcttggttgcctcacagaagaatgatctggatgctgtggcactcctgcagcctgacgggagtgcagtggtggtagtactgaacaggtctagcaaagatgttcccttgactatcaaagacccagctgtgggctttctggaaaccatttcccctggatactctatccacacctatctctggagaagacagtaatga

SEQ ID NO: 602 - protein, 536 aa, synthetic construct
  REGION 1..536: note = Variant of B-Glucocerebrosidase
MEFSSPSREECPKPLSRVSIMAGSLTGLLLLQAVSWASGARPCIPKSFGYSSVVCVCNATYCDSFDPPTLPALGTFSRYESTRSGRRMELSMGPIQANHTGTGLLLTLQPEQKFQKVKGFGGAMTDAAALNILALSPPAQNLLLKSYFSEEGIGYNIIRVPMASCDFSIRTYTYADTPDDFQLHNFSLPEEDTKLKIPLIHRALQLSQRPVSLFASPWTSPTWLKTNGAVNGKGSLKGQPGDIYHQTWARYFVKFLDAYAEHKLQFWAVTAENEPSAGLLSGYPFQCLGFTPEHQRDFIARDLGPTLANSTHHNVRLLMLDDQRLLLPHWAKVVLTDPEAAKYVHGIAVHWYLDFLAPAKATLGETHRLFPNTMLFASEACVGSKFWEQSVRLGSWDRGMQYSHSIITNLLYHVVGWTDWNLALNPEGGPNWVRNFVDSPIIVDITKDTFYKQPMFYHLGHFSKFIPEGSQRVGLVASQKNDLDAVALLQPDGSAVVVVLNRSSKDVPLTIKDPAVGFLETISPGYSIHTYLWRRQ

SEQ ID NO: 603 - DNA, 1614 bp, synthetic construct
  misc_feature 1..1614: note = Variant of B-Glucocerebrosidase
  source 1..1614: mol_type = other DNA
atggagttttcttctcctagtagagaagaatgccccaagccactgagcagggtgagcatcatggctggatccctcacagggctgcttcttttgcaggcagtctcatgggcctctggagccaggccctgtattcccaagtcattcggctactcctcagtggtgtgtgtatgcaatgccacctattgtgacagtttcgatcctccaactctccctgctctgggtaccttctcccggtatgagagcacaagaagtggaagacgcatggagctctcaatgggccctatacaggctaaccacactactacaggtctgctgctgaccctccaacctgaacagaagtttcagaaagtcaagggatttggaggagccatgactgatgcagcagcactcaacatcttggccctgtctccaccagcccagaatctgctgttgaagtcctacttctcagaggaggggattggctacaacatcatccgggttcccatggctagctgtgacttctccattaggacctatacatacgctgacacccccgatgattttcagctccataatttcagtctccctgaagaagacaccaaactgaagatacctctgattcacagagccttgcaactgtcccaaaggccagtgagcctcttcgcttctccctggactagtcctacatggctgaagactaatggtgctgttaatgggaaaggctccctgaaaggacagccaggtgacatatatcatcagacatgggcccgctactttgtgaaattccttgatgcctatgcagagcacaagctccaattctgggcagtcaccgcagaaaacgagccctcagctgggctgctgtctggctacccctttcagtgcttgggctttactcctgagcatcaacgggacttcattgcccgggatttggggccaacactggccaacagcacccaccacaatgtaagactcctcatgctggatgaccagaggctgctgctccctcattgggccaaggtggtgttgacagacccagaagctgccaaatatgttcatggcatcgctgtccactggtacctggattttttggcccctgcaaaggctactctgggagagacccacagactcttccccaataccatgctgtttgcatcagaagcctgcgtggggagcaaattctgggagcagtctgttaggctgggttcctgggatcggggcatgcaatattcccatagtataataactaacctcctctaccacgtggtaggatggacagactggaatctggctttgaacccagaaggaggccccaattgggtgcgcaactttgttgacagccccatcattgtggatatcacaaaggacaccttctacaaacagcctatgttctatcatctggggcactttagcaagttcattccagagggttcccagagagtaggcttggttgcctcacagaagaatgatctggatgctgtggcactcctgcatcctgacgggagtgcagtggtggtagtactgaacaggtctagcaaagatgttcccttgactatcaaagacccagctgtgggctttctggaaaccatttcccctggatactctatccacacctatctctggagaagacagtaatga

SEQ ID NO: 604 - protein, 536 aa, synthetic construct
  REGION 1..536: note = Variant of B-Glucocerebrosidase
MEFSSPSREECPKPLSRVSIMAGSLTGLLLLQAVSWASGARPCIPKSFGYSSVVCVCNATYCDSFDPPTLPALGTFSRYESTRSGRRMELSMGPIQANHTTTGLLLTLQPEQKFQKVKGFGGAMTDAAALNILALSPPAQNLLLKSYFSEEGIGYNIIRVPMASCDFSIRTYTYADTPDDFQLHNFSLPEEDTKLKIPLIHRALQLSQRPVSLFASPWTSPTWLKTNGAVNGKGSLKGQPGDIYHQTWARYFVKFLDAYAEHKLQFWAVTAENEPSAGLLSGYPFQCLGFTPEHQRDFIARDLGPTLANSTHHNVRLLMLDDQRLLLPHWAKVVLTDPEAAKYVHGIAVHWYLDFLAPAKATLGETHRLFPNTMLFASEACVGSKFWEQSVRLGSWDRGMQYSHSIITNLLYHVVGWTDWNLALNPEGGPNWVRNFVDSPIIVDITKDTFYKQPMFYHLGHFSKFIPEGSQRVGLVASQKNDLDAVALLHPDGSAVVVVLNRSSKDVPLTIKDPAVGFLETISPGYSIHTYLWRRQ

SEQ ID NO: 605 - DNA, 1614 bp, synthetic construct
  misc_feature 1..1614: note = Variant of B-Glucocerebrosidase
  source 1..1614: mol_type = other DNA
atggagttttcttctcctagtagagaagaatgccccaagccactgagcagggtgagcatcatggctggatccctcacagggctgcttcttttgcaggcagtctcatgggcctctggagccaggccctgtattcccaagtcattcggctactcctcagtggtgtgtgtatgcaatgccacctattgtgacagtttcgatcctccaactctccctgctctgggtaccttctcccggtatgagagcacaagaagtggaagacgcatggagctctcaatgggccctatacaggctaaccacactgggacagctctgctgctgaccctccaacctgaacagaagtttcagaaagtcaagggatttggaggagccatgactgatgcagcagcactcaacatcttggccctgtctccaccagcccagaatctgctgttgaagtcctacttctcagaggaggggattggctacaacatcatccgggttcccatggctagctgtgacttctccattaggacctatacatacgctgacacccccgatgattttcagctccataatttcagtctccctgaagaagacaccaaactgaagatacctctgattcacagagccttgcaactgtcccaaaggccagtgagcctcttcgcttctccctggactagtcctacatggctgaagactaatggtgctgttaatgggaaaggctccctgaaaggacagccaggtgacatatatcatcagacatgggcccgctactttgtgaaattccttgatgcctatgcagagcacaagctccaattctgggcagtcaccgcagaaaacgagccctcagctgggctgctgtctggctacccctttcagtgcttgggctttactcctgagcatcaacgggacttcattgcccgggatttggggccaacactggccaacagcacccaccacaatgtaagactcctcatgctggatgaccagaggctgctgctccctcattgggccaaggtggtgttgacagacccagaagctgccaaatatgttcatggcatcgctgtccactggtacctggattttttggcccctgcaaaggctactctgggagagacccacagactcttccccaataccatgctgtttgcatcagaagcctgcgtggggagcaaattctgggagcagtctgttaggctgggttcctgggatcggggcatgcaatattcccatagtataataactaacctcctctaccacgtggtaggatggacagactggaatctggctttgaacccagaaggaggccccaattgggtgcgcaactttgttgacagccccatcattgtggatatcacaaaggacaccttctacaaacagcctatgttctatcatctggggcactttagcaagttcattccagagggttcccagagagtaggcttggttgcctcacagaagaatgatctggatgctgtggcactcctgcatcctgacgggagtgcagtggtggtagtactgaacaggtctagcaaagatgttcccttgactatcaaagacccagctgtgggctttctggaaaccatttcccctggatactctatccacacctatctctggagaagacagtaatga

SEQ ID NO: 606 - protein, 536 aa, synthetic construct
  REGION 1..536: note = Variant of B-Glucocerebrosidase
MEFSSPSREECPKPLSRVSIMAGSLTGLLLLQAVSWASGARPCIPKSFGYSSVVCVCNATYCDSFDPPTLPALGTFSRYESTRSGRRMELSMGPIQANHTGTALLLTLQPEQKFQKVKGFGGAMTDAAALNILALSPPAQNLLLKSYFSEEGIGYNIIRVPMASCDFSIRTYTYADTPDDFQLHNFSLPEEDTKLKIPLIHRALQLSQRPVSLFASPWTSPTWLKTNGAVNGKGSLKGQPGDIYHQTWARYFVKFLDAYAEHKLQFWAVTAENEPSAGLLSGYPFQCLGFTPEHQRDFIARDLGPTLANSTHHNVRLLMLDDQRLLLPHWAKVVLTDPEAAKYVHGIAVHWYLDFLAPAKATLGETHRLFPNTMLFASEACVGSKFWEQSVRLGSWDRGMQYSHSIITNLLYHVVGWTDWNLALNPEGGPNWVRNFVDSPIIVDITKDTFYKQPMFYHLGHFSKFIPEGSQRVGLVASQKNDLDAVALLHPDGSAVVVVLNRSSKDVPLTIKDPAVGFLETISPGYSIHTYLWRRQ

SEQ ID NO: 607 - DNA, 1614 bp, synthetic construct
  misc_feature 1..1614: note = Variant of B-Glucocerebrosidase
  source 1..1614: mol_type = other DNA
atggagttttcttctcctagtagagaagaatgccccaagccactgagcagggtgagcatcatggctggatccctcacagggctgcttcttttgcaggcagtctcatgggcctctggagccaggccctgtattcccaagtcattcggctactcctcagtggtgtgtgtatgcaatgccacctattgtgacagtttcgatcctccaactctccctgctctgggtaccttctcccggtatgagagcacaagaagtggaagacgcatggagctctcaatgggccctatacaggctaaccacactgggacaggtctgctgctgaccctccaacctgaacagaagtttcagaaagtcaagggatttggaggagccatgactgatgcagcagcactcaacatcttggccctgtctccaccagcccagaatctgctgttgaagtcctacttctcagaggaggggattggctacaacatcatccgggttcccatggctagctgtgacttctccattaggacctatacatacgctgacacccccgatgattttcagctccataatttcagtctccctgaagaagacaccaaactgaagatacctctgattcacagagccttgcaactgtcccaaaggccagtgagcctcttcgcttctccctggactagtcctacatggctgaagactaatggtgctgttaatgggaaaggctccctgaaaggacagccaggtgacatatatcatcagacatgggcccgctactttgtgaaattccttgatgcctatgcagagcacaagctccaattctgggcagtcaccgcagaaaacgagccctcagctgggctgctgtctggctacccctttcagtgcttgggctttactcctgagcatcaacgggacttcattgcccgggatttggggccaacactggccaacagcacccaccacaatgtaagactcctcatgctggatgaccagaggctgctgctccctcattgggccaaggtggtgttgacagacccagaagctgccaaatatgttcatggcatcgctgtccactggtacctggattttttggcccctgcaaaggctactctgggagagacccacagactcttccccaataccatgctgtttgcatcagaagcctgcgtggggagcaaattctgggagcagtctgttaggctgggttcctgggatcggggcatgcaatattcccatagtataataactaacctcctctaccacgtggtaggatggacagactggaatctggctttgaacccagaaggaggccccaattgggtgcgcaactttgttgacagccccatcattgtggatatcacaaaggacaccttctacaaacagcctatgttctatcatctggggcactttagcaagttcattccagagggttcccagagagtaggcttggttgcctcacagaagaatgatctggatgctgtggcactcctgcatcctgacgggagtgcagtggtggtagtactgaacaggtctagcaaagatacgcccttgactatcaaagacccagctgtgggctttctggaaaccatttcccctggatactctatccacacctatctctggagaagacagtaatga

SEQ ID NO: 608 - protein, 536 aa, synthetic construct
  REGION 1..536: note = Variant of B-Glucocerebrosidase
MEFSSPSREECPKPLSRVSIMAGSLTGLLLLQAVSWASGARPCIPKSFGYSSVVCVCNATYCDSFDPPTLPALGTFSRYESTRSGRRMELSMGPIQANHTGTGLLLTLQPEQKFQKVKGFGGAMTDAAALNILALSPPAQNLLLKSYFSEEGIGYNIIRVPMASCDFSIRTYTYADTPDDFQLHNFSLPEEDTKLKIPLIHRALQLSQRPVSLFASPWTSPTWLKTNGAVNGKGSLKGQPGDIYHQTWARYFVKFLDAYAEHKLQFWAVTAENEPSAGLLSGYPFQCLGFTPEHQRDFIARDLGPTLANSTHHNVRLLMLDDQRLLLPHWAKVVLTDPEAAKYVHGIAVHWYLDFLAPAKATLGETHRLFPNTMLFASEACVGSKFWEQSVRLGSWDRGMQYSHSIITNLLYHVVGWTDWNLALNPEGGPNWVRNFVDSPIIVDITKDTFYKQPMFYHLGHFSKFIPEGSQRVGLVASQKNDLDAVALLHPDGSAVVVVLNRSSKDTPLTIKDPAVGFLETISPGYSIHTYLWRRQ

SEQ ID NO: 609 - DNA, 1614 bp, synthetic construct
  misc_feature 1..1614: note = Variant of B-Glucocerebrosidase
  source 1..1614: mol_type = other DNA
atggagttttcttctcctagtagagaagaatgccccaagccactgagcagggtgagcatcatggctggatccctcacagggctgcttcttttgcaggcagtctcatgggcctctggagccaggccctgtattcccaagtcattcggctactcctcagtggtgtgtgtatgcaatgccacctattgtgacagtttcgatcctccaactctccctgctctgggtaccttctcccggtatgagagcacaagaagtggaagacgcatggagctctcaatgggccctatacaggctaaccacactgggacaggtctgctgctgaccctccaacctgaacagaagtttcagaaagtcaagggatttggaggagccatgactgatgcagcagcactcaacatcttggccctgtctccaccagcccagaatctgctgttgaagtcctacttctcagaggaggggattggctacaacatcatccgggttcccatggctagctgtgacttctccattaggacctatacatacgctgacacccccgatgattttcagctccataatttcagtctccctgaagaagacaccaaactgaagatacctctgattcacagagccttgcaactgtcccaaaggccagtgagcctcttcgcttctccctggactagtcctacatggctgaagactaatggtgctgttaatgggaaaggctccctgaaaggacagccaggtgacatatatcatcagacatgggcccgctactttgtgaaattccttgatgcctatgcagagcacaagctccaattctgggcagtcaccgcagaaaacgagccctcagctgggctgctgtctggctacccctttcagtgcttgggctttactcctgagcatcaacgggacttcattgcccgggatttggggccaacactggccaacagcacccaccacaatgtaagactcctcatgctggatgaccagaggctgctgctccctcattgggccaaggtggtgttgacagacccagaagctgccaaatatgttcatggcatcgctgtccactggtacctggattttttggcccctgcaaaggctactctgggagagacccacagactcttccccaataccatgctgtttgcatcagaagcctgcgtggggagcaaattctgggagcagtctgttaggctgggttcctgggatcggggcatgcaatattcccatagtataataactaacctcctctaccacgtggtaggatggacagactggaatctggctttgaacccagaaggaggccccaattgggtgcgcaactttgttgacagccccatcattgtggatatcacaaaggacaccttctacaaacagcctatgttctatcatctggggcactttagcaagttcattccagagggttccacgagagtaggcttggttgcctcacagaagaatgatctggatgctgtggcactcctgcatcctgacgggagtgcagtggtggtagtactgaacaggtctagcaaagatgttcccttgactatcaaagacccagctgtgggctttctggaaaccatttcccctggatactctatccacacctatctctggagaagacagtaatga

SEQ ID NO: 610 - protein, 536 aa, synthetic construct
  REGION 1..536: note = Variant of B-Glucocerebrosidase
MEFSSPSREECPKPLSRVSIMAGSLTGLLLLQAVSWASGARPCIPKSFGYSSVVCVCNATYCDSFDPPTLPALGTFSRYESTRSGRRMELSMGPIQANHTGTGLLLTLQPEQKFQKVKGFGGAMTDAAALNILALSPPAQNLLLKSYFSEEGIGYNIIRVPMASCDFSIRTYTYADTPDDFQLHNFSLPEEDTKLKIPLIHRALQLSQRPVSLFASPWTSPTWLKTNGAVNGKGSLKGQPGDIYHQTWARYFVKFLDAYAEHKLQFWAVTAENEPSAGLLSGYPFQCLGFTPEHQRDFIARDLGPTLANSTHHNVRLLMLDDQRLLLPHWAKVVLTDPEAAKYVHGIAVHWYLDFLAPAKATLGETHRLFPNTMLFASEACVGSKFWEQSVRLGSWDRGMQYSHSIITNLLYHVVGWTDWNLALNPEGGPNWVRNFVDSPIIVDITKDTFYKQPMFYHLGHFSKFIPEGSTRVGLVASQKNDLDAVALLHPDGSAVVVVLNRSSKDVPLTIKDPAVGFLETISPGYSIHTYLWRRQ

SEQ ID NO: 611 - DNA, 1614 bp, synthetic construct
  misc_feature 1..1614: note = Variant of B-Glucocerebrosidase
  source 1..1614: mol_type = other DNA
atggagttttcttctcctagtagagaagaatgccccaagccactgagcagggtgagcatcatggctggatccctcacagggctgcttcttttgcaggcagtctcatgggcctctggagccaggccctgtattcccaagtcattcggctactcctcagtggtgtgtgtatgcaatgccacctattgtgacagtttcgatcctccaactctccctgctctgggtaccttctcccggtatgagagcacaagaagtggaagacgcatggagctctcaatgggccctatacaggctaaccacactgggacaggtctgctgctgaccctccaacctgaacagaagtttcagaaagtcaagggatttggaggagccatgactgatgcagcagcactcaacatcttggccctgtctccaccagcccagaatctgctgttgaagtcctacttctcagaggaggggattggctacaacatcatccgggttcccatggctagctgtgacttctccattaggacctatacatacgctgacacccccgatgattttcagctccataatttcagtctccctgaagaagacaccaaactgaagatacctctgattcacagagccttgcaactgtcccaaaggccagtgagcctcttcgcttctccctggactagtcctacatggctgaagactaatggtgctgttaatgggaaaggctccctgaaaggacagccaggtgacatatatcatcagacatgggcccgctactttgtgaaattccttgatgcctatgcagagcacaagctccaattctgggcagtcaccgcagaaaacgagccctcagctgggctgctgtctggctacccctttcagtgcttgggctttactcctgagcatcaacgggacttcattgcccgggatttggggccaacactggccaacagcacccaccacaatgtaagactcctcatgctggatgaccagaggctgctgctccctcattgggccaaggtggtgttgacagacccagaagctgccaaatatgttcatggcatcgctgtccactggtacctggattttttggcccctgcaaaggctactctgggagagacccacagactcttccccaataccatgctgtttgcatcagaagcctgcgtggggagcaaattctgggagcagtctgttaggctgggttcctgggatcggggcatgcaatattcccatagtataataactaacctcctctaccacgtggtaggatggacagactggaatctggctttgaacccagaaggaggccccaattgggtgcgcaactttgttgacagccccatcattgtggatatcacaaaggacaccttctacaaacagcctatgttctatcatctggggcactttagcaagttcattccagagggttcccagagagtaggcttggttgcctcacagaagaatgatctggatgctgtggcactcctgcatcctgacgggagtgcagtggtggtagtactgaacaggtctagcaaagatgttcccgtgactatcaaagacccagctgtgggctttctggaaaccatttcccctggatactctatccacacctatctctggagaagacagtaatga

SEQ ID NO: 612 - protein, 536 aa, synthetic construct
  REGION 1..536: note = Variant of B-Glucocerebrosidase
MEFSSPSREECPKPLSRVSIMAGSLTGLLLLQAVSWASGARPCIPKSFGYSSVVCVCNATYCDSFDPPTLPALGTFSRYESTRSGRRMELSMGPIQANHTGTGLLLTLQPEQKFQKVKGFGGAMTDAAALNILALSPPAQNLLLKSYFSEEGIGYNIIRVPMASCDFSIRTYTYADTPDDFQLHNFSLPEEDTKLKIPLIHRALQLSQRPVSLFASPWTSPTWLKTNGAVNGKGSLKGQPGDIYHQTWARYFVKFLDAYAEHKLQFWAVTAENEPSAGLLSGYPFQCLGFTPEHQRDFIARDLGPTLANSTHHNVRLLMLDDQRLLLPHWAKVVLTDPEAAKYVHGIAVHWYLDFLAPAKATLGETHRLFPNTMLFASEACVGSKFWEQSVRLGSWDRGMQYSHSIITNLLYHVVGWTDWNLALNPEGGPNWVRNFVDSPIIVDITKDTFYKQPMFYHLGHFSKFIPEGSQRVGLVASQKNDLDAVALLHPDGSAVVVVLNRSSKDVPVTIKDPAVGFLETISPGYSIHTYLWRRQ

SEQ ID NO: 613 - DNA, 1614 bp, synthetic construct
  misc_feature 1..1614: note = Variant of B-Glucocerebrosidase
  source 1..1614: mol_type = other DNA
atggagttttcttctcctagtagagaagaatgccccaagccactgagcagggtgagcatcatggctggatccctcacagggctgcttcttttgcaggcagtctcatgggcctctggagccaggccctgtattcccaagtcattcggctactcctcagtggtgtgtgtatgcaatgccacctattgtgacagtttcgatcctccaactctccctgctctgggtaccttctcccggtatgagagcacaagaagtggaagacgcatggagctctcaatgggccctatacaggctaaccacactgggacaggtctgctgctgaccctccaacctgaacagaagtttcagaaagtcaagggatttggaggagccatgactgatgcagcagcactcaacatcttggccctgtctccaccagcccagaatctgctgttgaagtcctacttctcagaggaggggattggctacaacatcatccgggttcccatggctagctgtgacttctccattaggacctatacatacgctgacacccccgatgattttcagctccataatttcagtctccctgaagaagacaccaaactgaagatacctctgattcacagagccttgcaactgtcccaaaggccagtgagcctcttcgcttctccctggactagtcctacatggctgaagactaatggtgctgttaatgggaaaggctccctgaaaggacagccaggtgacatatatcatcagacatgggcccgctactttgtgaaattccttgatgcctatgcagagcacaagctccaattctgggcagtcaccgcagaaaacgagccctcagctgggctgctgtctggctacccctttcagtgcttgggctttactcctgagcatcaacgggacttcattgcccgggatttggggccaacactggccaacagcacccaccacaatgtaagactcctcatgctggatgaccagaggctgctgctccctcattgggccaaggtggtgttgacagacccagaagctgccaaatatgttcatggcatcgctgtccactggtacctggattttttggcccctgcaaaggctactctgggagagacccacagactcttccccaataccatgctgtttgcatcagaagcctgcgtggggagcaaattctgggagcagtctgttaggctgggttcctgggatcggggcatgcaatattcccatagtataataactaacctcctctaccacgtggtaggatggacagactggaatctggctttgaacccagaaggaggccccaattgggtgcgcaactttgttgacagccccatcattgtggatatcacaaaggacaccttctacaaacagcctatgttctatcatctggggcactttagcaagttcattccagagggttcccagagagtaggcttggttgcctcacagaagaatgatctggatgctgtggcactcctgcatcctgacgggagtgcagtggtggtagtactgaacaggtctagcaaagatgttcccttgactatcaaagacccagctgtgggctttctgcggaccatttcccctggatactctatccacacctatctctggagaagacagtaatga

SEQ ID NO: 614 - protein, 536 aa, synthetic construct
  REGION 1..536: note = Variant of B-Glucocerebrosidase
MEFSSPSREECPKPLSRVSIMAGSLTGLLLLQAVSWASGARPCIPKSFGYSSVVCVCNATYCDSFDPPTLPALGTFSRYESTRSGRRMELSMGPIQANHTGTGLLLTLQPEQKFQKVKGFGGAMTDAAALNILALSPPAQNLLLKSYFSEEGIGYNIIRVPMASCDFSIRTYTYADTPDDFQLHNFSLPEEDTKLKIPLIHRALQLSQRPVSLFASPWTSPTWLKTNGAVNGKGSLKGQPGDIYHQTWARYFVKFLDAYAEHKLQFWAVTAENEPSAGLLSGYPFQCLGFTPEHQRDFIARDLGPTLANSTHHNVRLLMLDDQRLLLPHWAKVVLTDPEAAKYVHGIAVHWYLDFLAPAKATLGETHRLFPNTMLFASEACVGSKFWEQSVRLGSWDRGMQYSHSIITNLLYHVVGWTDWNLALNPEGGPNWVRNFVDSPIIVDITKDTFYKQPMFYHLGHFSKFIPEGSQRVGLVASQKNDLDAVALLHPDGSAVVVVLNRSSKDVPLTIKDPAVGFLRTISPGYSIHTYLWRRQ

SEQ ID NO: 615 - DNA, 1614 bp, synthetic construct
  misc_feature 1..1614: note = Variant of B-Glucocerebrosidase
  source 1..1614: mol_type = other DNA
atggagttttcttctcctagtagagaagaatgccccaagccactgagcagggtgagcatcatggctggatccctcacagggctgcttcttttgcaggcagtctcatgggcctctggagccaggccctgtattcccaagtcattcggctactcctcagtggtgtgtgtatgcaatgccacctattgtgacagtttcgatcctccaactctccctgctctgggtaccttctcccggtatgagagcacaagaagtggaagacgcatggagctctcaatgggccctatacaggctaaccacactgggacaggtctgctgctgaccctccaacctgaacagaagtttcagaaagtcaagggatttggaggagccatgactgatgcagcagcactcaacatcttggccctgtctccaccagcccagaatctgctgttgaagtcctacttctcagaggaggggattggctacaacatcatccgggttcccatggctagctgtgacttctccattaggacctatacatacgctgacacccccgatgattttcagctccataatttcagtctccctgaagaagacaccaaactgaagatacctctgattcacagagccttgcaactgtcccaaaggccagtgagcctcttcgcttctccctggactagtcctacatggctgaagactaatggtgctgttaatgggaaaggctccctgaaaggacagccaggtgacatatatcatcagacatgggcccgctactttgtgaaattccttgatgcctatgcagagcacaagctccaattctgggcagtcaccgcagaaaacgagccctcagctgggctgctgtctggctacccctttcagtgcttgggctttactcctgagcatcaacgggacttcattgcccgggatttggggccaacactggccaacagcacccaccacaatgtaagactcctctttctggatgaccagaggctgctgctccctcattgggccaaggtggtgttgacagacccagaagctgccaaatatgttcatggcatcgctgtccactggtacctggattttttggcccctgcaaaggctactctgggagagacccacagactcttccccaataccatgctgtttgcatcagaagcctgcgtggggagcaaattctgggagcagtctgttaggctgggttcctgggatcggggcatgcaatattcccatagtataataactaacctcctctaccacgtggtaggatggacagactggaatctggctttgaacccagaaggaggccccaattgggtgcgcaactttgttgacagccccatcattgtggatatcacaaaggacaccttctacaaacagcctatgttctatcatctggggcactttagcaagttcattccagagggttcccagagagtaggcttggttgcctcacagaagaatgatctggatgctgtggcactcctgcatcctgacgggagtgcagtggtggtagtactgaacaggtctagcaaagatgttcccttgactatcaaagacccagctgtgggctttctggaaaccatttcccctggatactctatccacacctatctctggagaagacagtaatga

SEQ ID NO: 616 - protein, 536 aa, synthetic construct
  REGION 1..536: note = Variant of B-Glucocerebrosidase
MEFSSPSREECPKPLSRVSIMAGSLTGLLLLQAVSWASGARPCIPKSFGYSSVVCVCNATYCDSFDPPTLPALGTFSRYESTRSGRRMELSMGPIQANHTGTGLLLTLQPEQKFQKVKGFGGAMTDAAALNILALSPPAQNLLLKSYFSEEGIGYNIIRVPMASCDFSIRTYTYADTPDDFQLHNFSLPEEDTKLKIPLIHRALQLSQRPVSLFASPWTSPTWLKTNGAVNGKGSLKGQPGDIYHQTWARYFVKFLDAYAEHKLQFWAVTAENEPSAGLLSGYPFQCLGFTPEHQRDFIARDLGPTLANSTHHNVRLLFLDDQRLLLPHWAKVVLTDPEAAKYVHGIAVHWYLDFLAPAKATLGETHRLFPNTMLFASEACVGSKFWEQSVRLGSWDRGMQYSHSIITNLLYHVVGWTDWNLALNPEGGPNWVRNFVDSPIIVDITKDTFYKQPMFYHLGHFSKFIPEGSQRVGLVASQKNDLDAVALLHPDGSAVVVVLNRSSKDVPLTIKDPAVGFLETISPGYSIHTYLWRRQ

SEQ ID NO: 617 - DNA, 1614 bp, synthetic construct
  misc_feature 1..1614: note = Variant of B-Glucocerebrosidase
  source 1..1614: mol_type = other DNA
atggagttttcttctcctagtagagaagaatgccccaagccactgagcagggtgagcatcatggctggatccctcacagggctgcttcttttgcaggcagtctcatgggcctctggagccaggccctgtattcccaagtcattcggctactcctcagtggtgtgtgtatgcaatgccacctattgtgacagtttcgatcctccaactctccctgctctgggtaccttctcccggtatgagagcacaagaagtggaagacgcatggagctctcaatgggccctatacaggctaaccacactgggacaggtctgctgctgaccctccaacctgaacagaagtttcagaaagtcaagggatttggaggagccatgactgatgcagcagcactcaacatcttggccctgtctccaccagcccagaataatctgttgaagtcctacttctcagaggaggggattggctacaacatcatccgggttcccatggctagctgtgacttctccattaggacctatacatacgctgacacccccgatgattttcagctccataatttcagtctccctgaagaagacaccaaactgaagatacctctgattcacagagccttgcaactgtcccaaaggccagtgagcctcttcgcttctccctggactagtcctacatggctgaagactaatggtgctgttaatgggaaaggctccctgaaaggacagccaggtgacatatatcatcagacatgggcccgctactttgtgaaattccttgatgcctatgcagagcacaagctccaattctgggcagtcaccgcagaaaacgagccctcagctgggctgctgtctggctacccctttcagtgcttgggctttactcctgagcatcaacgggacttcattgcccgggatttggggccaacactggccaacagcacccaccacaatgtaagactcctcatgctggatgaccagaggctgctgctccctcattgggccaaggtggtgttgacagacccagaagctgccaaatatgttcatggcatcgctgtccactggtacctggattttttggcccctgcaaaggctactctgggagagacccacagactcttccccaataccatgctgtttgcatcagaagcctgcgtggggagcaaattctgggagcagtctgttaggctgggttcctgggatcggggcatgcaatattcccatagtataataactaacctcctctaccacgtggtaggatggacagactggaatctggctttgaacccagaaggaggccccaattgggtgcgcaactttgttgacagccccatcattgtggatatcacaaaggacaccttctacaaacagcctatgttctatcatctggggcactttagcaagttcattccagagggttcccagagagtaggcttggttgcctcacagaagaatgatctggatgctgtggcactcctgcatcctgacgggagtgcagtggtggtagtactgaacaggtctagcaaagatgttcccttgactatcaaagacccagctgtgggctttctggaaaccatttcccctggatactctatccacacctatctctggagaagacagtaatga

SEQ ID NO: 618 - protein, 536 aa, synthetic construct
  REGION 1..536: note = Variant of B-Glucocerebrosidase
MEFSSPSREECPKPLSRVSIMAGSLTGLLLLQAVSWASGARPCIPKSFGYSSVVCVCNATYCDSFDPPTLPALGTFSRYESTRSGRRMELSMGPIQANHTGTGLLLTLQPEQKFQKVKGFGGAMTDAAALNILALSPPAQNNLLKSYFSEEGIGYNIIRVPMASCDFSIRTYTYADTPDDFQLHNFSLPEEDTKLKIPLIHRALQLSQRPVSLFASPWTSPTWLKTNGAVNGKGSLKGQPGDIYHQTWARYFVKFLDAYAEHKLQFWAVTAENEPSAGLLSGYPFQCLGFTPEHQRDFIARDLGPTLANSTHHNVRLLMLDDQRLLLPHWAKVVLTDPEAAKYVHGIAVHWYLDFLAPAKATLGETHRLFPNTMLFASEACVGSKFWEQSVRLGSWDRGMQYSHSIITNLLYHVVGWTDWNLALNPEGGPNWVRNFVDSPIIVDITKDTFYKQPMFYHLGHFSKFIPEGSQRVGLVASQKNDLDAVALLHPDGSAVVVVLNRSSKDVPLTIKDPAVGFLETISPGYSIHTYLWRRQ

SEQ ID NO: 619 - DNA, 1614 bp, synthetic construct
  misc_feature 1..1614: note = Variant of B-Glucocerebrosidase
  source 1..1614: mol_type = other DNA
atggagttttcttctcctagtagagaagaatgccccaagccactgagcagggtgagcatcatggctggatccctcacagggctgcttcttttgcaggcagtctcatgggcctctggagccaggccctgtattcccaagtcattcggctactcctcagtggtgtgtgtatgcaatgccacctattgtgacagtttcgatcctccaactctccctgctctgggtaccttctcccgggtggagagcacaagaagtggaagacgcatggagctctcaatgggccctatacaggctaaccacactgggacaggtctgctgctgaccctccaacctgaacagaagtttcagaaagtcaagggatttggaggagccatgactgatgcagcagcactcaacatcttggccctgtctccaccagcccagaatctgctgttgaagtcctacttctcagaggaggggattggctacaacatcatccgggttcccatggctagctgtgacttctccattaggacctatacatacgctgacacccccgatgattttcagctccataatttcagtctccctgaagaagacaccaaactgaagatacctctgattcacagagccttgcaactgtcccaaaggccagtgagcctcttcgcttctccctggactagtcctacatggctgaagactaatggtgctgttaatgggaaaggctccctgaaaggacagccaggtgacatatatcatcagacatgggcccgctactttgtgaaattccttgatgcctatgcagagcacaagctccaattctgggcagtcaccgcagaaaacgagccctcagctgggctgctgtctggctacccctttcagtgcttgggctttactcctgagcatcaacgggacttcattgcccgggatttggggccaacactggccaacagcacccaccacaatgtaagactcctcatgctggatgaccagaggctgctgctccctcattgggccaaggtggtgttgacagacccagaagctgccaaatatgttcatggcatcgctgtccactggtacctggattttttggcccctgcaaaggctactctgggagagacccacagactcttccccaataccatgctgtttgcatcagaagcctgcgtggggagcaaattctgggagcagtctgttaggctgggttcctgggatcggggcatgcaatattcccatagtataataactaacctcctctaccacgtggtaggatggacagactggaatctggctttgaacccagaaggaggccccaattgggtgcgcaactttgttgacagccccatcattgtggatatcacaaaggacaccttctacaaacagcctatgttctatcatctggggcactttagcaagttcattccagagggttcccagagagtaggcttggttgcctcacagaagaatgatctggatgctgtggcactcctgcatcctgacgggagtgcagtggtggtagtactgaacaggtctagcaaagatgttcccttgactatcaaagacccagctgtgggctttctggaaaccatttcccctggatactctatccacacctatctctggagaagacagtaatga

SEQ ID NO: 620 - protein, 536 aa, synthetic construct
  REGION 1..536: note = Variant of B-Glucocerebrosidase
MEFSSPSREECPKPLSRVSIMAGSLTGLLLLQAVSWASGARPCIPKSFGYSSVVCVCNATYCDSFDPPTLPALGTFSRVESTRSGRRMELSMGPIQANHTGTGLLLTLQPEQKFQKVKGFGGAMTDAAALNILALSPPAQNLLLKSYFSEEGIGYNIIRVPMASCDFSIRTYTYADTPDDFQLHNFSLPEEDTKLKIPLIHRALQLSQRPVSLFASPWTSPTWLKTNGAVNGKGSLKGQPGDIYHQTWARYFVKFLDAYAEHKLQFWAVTAENEPSAGLLSGYPFQCLGFTPEHQRDFIARDLGPTLANSTHHNVRLLMLDDQRLLLPHWAKVVLTDPEAAKYVHGIAVHWYLDFLAPAKATLGETHRLFPNTMLFASEACVGSKFWEQSVRLGSWDRGMQYSHSIITNLLYHVVGWTDWNLALNPEGGPNWVRNFVDSPIIVDITKDTFYKQPMFYHLGHFSKFIPEGSQRVGLVASQKNDLDAVALLHPDGSAVVVVLNRSSKDVPLTIKDPAVGFLETISPGYSIHTYLWRRQ

SEQ ID NO: 621 - DNA, 1614 bp, synthetic construct
  misc_feature 1..1614: note = Variant of B-Glucocerebrosidase
  source 1..1614: mol_type = other DNA
atggagttttcttctcctagtagagaagaatgccccaagccactgagcagggtgagcatcatggctggatccctcacagggctgcttcttttgcaggcagtctcatgggcctctggagccaggccctgtattcccaagtcattcggctactcctcagtggtgtgtgtatgcaatgccacctattgtgacagtttcgatcctccaactctccctgctctgggtaccttctcccggtatgagagcacaagaagtggaagacgcatggagctctcaatgggccctatacaggctaaccacactgggacaggtctgctgctgaccctccaacctgaacagaagtttcagaaagtcaagggatttggaggagccatgactgatgcagcagcactcaacatcttggccctgtctccaccagcccagaatctgctgttgaagtcctacttctcagaggaggggattggctacaacatcatccgggttcccatggctagctgtgacttctccattaggacctatacatacgctgacacccccgatgattttcagctccataatttcagtctccctgaagaagacaccaaactgaagatacctctgattcacagagccttgcaactgtcccaaaggccagtgagcctcttcgcttctccctggactagtcctacatggctgaagactaatggtgctgttaatgggaaaggctccctgaaaggacagccaggtgacatatatcatcagacatgggcccgctactttgtgaaattccttgatgcctatgcagagcacaagctccaattctgggcagtcaccgcagaaaacgagccctcagctgggctgctgtctggctacccctttcagtgcttgggctttactcctgagcatcaacgggacttcattgcccgggatttggggccaacactggccaacagcacccaccacaatgtaagactcctcatgctggatgaccagaggctgctgctccctcattgggccaaggtggtgttgacagacccagaagctgccaaatatgttcatggcatcgctgtccactggtacctggattttttggcccctgcaaaggctactctgggagagacccacagactcttccccaataccatgctgtttgcatcagaagcctgcgtggggagcaaattctgggagcagtctgttaggctgggttcctgggatcggggcatgcaatattcccatagtataataactaacctcctctaccacgtggtaggatggacagactggaatctggctttgaacccagaaggaggccccaattgggtgcgcaactttgttgacagccccatcattgtggatatcacaaaggacaccttctacaaacagcctatgttctatcatctggggcactttagcaagttcattcttgagggttcccagagagtaggcttggttgcctcacagaagaatgatctggatgctgtggcactcctgcatcctgacgggagtgcagtggtggtagtactgaacaggtctagcaaagatgttcccttgactatcaaagacccagctgtgggctttctggaaaccatttcccctggatactctatccacacctatctctggagaagacagtaatga

SEQ ID NO: 622 - protein, 536 aa, synthetic construct
  REGION 1..536: note = Variant of B-Glucocerebrosidase
MEFSSPSREECPKPLSRVSIMAGSLTGLLLLQAVSWASGARPCIPKSFGYSSVVCVCNATYCDSFDPPTLPALGTFSRYESTRSGRRMELSMGPIQANHTGTGLLLTLQPEQKFQKVKGFGGAMTDAAALNILALSPPAQNLLLKSYFSEEGIGYNIIRVPMASCDFSIRTYTYADTPDDFQLHNFSLPEEDTKLKIPLIHRALQLSQRPVSLFASPWTSPTWLKTNGAVNGKGSLKGQPGDIYHQTWARYFVKFLDAYAEHKLQFWAVTAENEPSAGLLSGYPFQCLGFTPEHQRDFIARDLGPTLANSTHHNVRLLMLDDQRLLLPHWAKVVLTDPEAAKYVHGIAVHWYLDFLAPAKATLGETHRLFPNTMLFASEACVGSKFWEQSVRLGSWDRGMQYSHSIITNLLYHVVGWTDWNLALNPEGGPNWVRNFVDSPIIVDITKDTFYKQPMFYHLGHFSKFILEGSQRVGLVASQKNDLDAVALLHPDGSAVVVVLNRSSKDVPLTIKDPAVGFLETISPGYSIHTYLWRRQ

SEQ ID NO: 623 - DNA, 1614 bp, synthetic construct
  misc_feature 1..1614: note = Variant of B-Glucocerebrosidase
  source 1..1614: mol_type = other DNA
atggagttttcttctcctagtagagaagaatgccccaagccactgagcagggtgagcatcatggctggatccctcacagggctgcttcttttgcaggcagtctcatgggcctctggagccaggccctgtattcccaagtcattcggctactcctcagtggtgtgtgtatgcaatgccacctattgtgacagtttcgatcctccaactctccctgctctgggtaccttcaatcggtatgagagcacaagaagtggaagacgcatggagctctcaatgggccctatacaggctaaccacactgggacaggtctgctgctgaccctccaacctgaacagaagtttcagaaagtcaagggatttggaggagccatgactgatgcagcagcactcaacatcttggccctgtctccaccagcccagaatctgctgttgaagtcctacttctcagaggaggggattggctacaacatcatccgggttcccatggctagctgtgacttctccattaggacctatacatacgctgacacccccgatgattttcagctccataatttcagtctccctgaagaagacaccaaactgaagatacctctgattcacagagccttgcaactgtcccaaaggccagtgagcctcttcgcttctccctggactagtcctacatggctgaagactaatggtgctgttaatgggaaaggctccctgaaaggacagccaggtgacatatatcatcagacatgggcccgctactttgtgaaattccttgatgcctatgcagagcacaagctccaattctgggcagtcaccgcagaaaacgagccctcagctgggctgctgtctggctacccctttcagtgcttgggctttactcctgagcatcaacgggacttcattgcccgggatttggggccaacactggccaacagcacccaccacaatgtaagactcctcatgctggatgaccagaggctgctgctccctcattgggccaaggtggtgttgacagacccagaagctgccaaatatgttcatggcatcgctgtccactggtacctggattttttggcccctgcaaaggctactctgggagagacccacagactcttccccaataccatgctgtttgcatcagaagcctgcgtggggagcaaattctgggagcagtctgttaggctgggttcctgggatcggggcatgcaatattcccatagtataataactaacctcctctaccacgtggtaggatggacagactggaatctggctttgaacccagaaggaggccccaattgggtgcgcaactttgttgacagccccatcattgtggatatcacaaaggacaccttctacaaacagcctatgttctatcatctggggcactttagcaagttcattccagagggttcccagagagtaggcttggttgcctcacagaagaatgatctggatgctgtggcactcctgcatcctgacgggagtgcagtggtggtagtactgaacaggtctagcaaagatgttcccttgactatcaaagacccagctgtgggctttctggaaaccatttcccctggatactctatccacacctatctctggagaagacagtaatga

SEQ ID NO: 624 - protein, 536 aa, synthetic construct
  REGION 1..536: note = Variant of B-Glucocerebrosidase
MEFSSPSREECPKPLSRVSIMAGSLTGLLLLQAVSWASGARPCIPKSFGYSSVVCVCNATYCDSFDPPTLPALGTFNRYESTRSGRRMELSMGPIQANHTGTGLLLTLQPEQKFQKVKGFGGAMTDAAALNILALSPPAQNLLLKSYFSEEGIGYNIIRVPMASCDFSIRTYTYADTPDDFQLHNFSLPEEDTKLKIPLIHRALQLSQRPVSLFASPWTSPTWLKTNGAVNGKGSLKGQPGDIYHQTWARYFVKFLDAYAEHKLQFWAVTAENEPSAGLLSGYPFQCLGFTPEHQRDFIARDLGPTLANSTHHNVRLLMLDDQRLLLPHWAKVVLTDPEAAKYVHGIAVHWYLDFLAPAKATLGETHRLFPNTMLFASEACVGSKFWEQSVRLGSWDRGMQYSHSIITNLLYHVVGWTDWNLALNPEGGPNWVRNFVDSPIIVDITKDTFYKQPMFYHLGHFSKFIPEGSQRVGLVASQKNDLDAVALLHPDGSAVVVVLNRSSKDVPLTIKDPAVGFLETISPGYSIHTYLWRRQ

SEQ ID NO: 625 - DNA, 1614 bp, synthetic construct
  misc_feature 1..1614: note = Variant of B-Glucocerebrosidase
  source 1..1614: mol_type = other DNA
atggagttttcttctcctagtagagaagaatgccccaagccactgagcagggtgagcatcatggctggatccctcacagggctgcttcttttgcaggcagtctcatgggcctctggagccaggccctgtattcccaagtcattcggctactcctcagtggtgtgtgtatgcaatgccacctattgtgacagtttcgatcctccaactctcctggctctgggtaccttctcccggtatgagagcacaagaagtggaagacgcatggagctctcaatgggccctatacaggctaaccacactgggacaggtctgctgctgaccctccaacctgaacagaagtttcagaaagtcaagggatttggaggagccatgactgatgcagcagcactcaacatcttggccctgtctccaccagcccagaatctgctgttgaagtcctacttctcagaggaggggattggctacaacatcatccgggttcccatggctagctgtgacttctccattaggacctatacatacgctgacacccccgatgattttcagctccataatttcagtctccctgaagaagacaccaaactgaagatacctctgattcacagagccttgcaactgtcccaaaggccagtgagcctcttcgcttctccctggactagtcctacatggctgaagactaatggtgctgttaatgggaaaggctccctgaaaggacagccaggtgacatatatcatcagacatgggcccgctactttgtgaaattccttgatgcctatgcagagcacaagctccaattctgggcagtcaccgcagaaaacgagccctcagctgggctgctgtctggctacccctttcagtgcttgggctttactcctgagcatcaacgggacttcattgcccgggatttggggccaacactggccaacagcacccaccacaatgtaagactcctcatgctggatgaccagaggctgctgctccctcattgggccaaggtggtgttgacagacccagaagctgccaaatatgttcatggcatcgctgtccactggtacctggattttttggcccctgcaaaggctactctgggagagacccacagactcttccccaataccatgctgtttgcatcagaagcctgcgtggggagcaaattctgggagcagtctgttaggctgggttcctgggatcggggcatgcaatattcccatagtataataactaacctcctctaccacgtggtaggatggacagactggaatctggctttgaacccagaaggaggccccaattgggtgcgcaactttgttgacagccccatcattgtggatatcacaaaggacaccttctacaaacagcctatgttctatcatctggggcactttagcaagttcattccagagggttcccagagagtaggcttggttgcctcacagaagaatgatctggatgctgtggcactcctgcatcctgacgggagtgcagtggtggtagtactgaacaggtctagcaaagatgttcccttgactatcaaagacccagctgtgggctttctggaaaccatttcccctggatactctatccacacctatctctggagaagacagtaatga

SEQ ID NO: 626 - protein, 536 aa, synthetic construct
  REGION 1..536: note = Variant of B-Glucocerebrosidase
MEFSSPSREECPKPLSRVSIMAGSLTGLLLLQAVSWASGARPCIPKSFGYSSVVCVCNATYCDSFDPPTLLALGTFSRYESTRSGRRMELSMGPIQANHTGTGLLLTLQPEQKFQKVKGFGGAMTDAAALNILALSPPAQNLLLKSYFSEEGIGYNIIRVPMASCDFSIRTYTYADTPDDFQLHNFSLPEEDTKLKIPLIHRALQLSQRPVSLFASPWTSPTWLKTNGAVNGKGSLKGQPGDIYHQTWARYFVKFLDAYAEHKLQFWAVTAENEPSAGLLSGYPFQCLGFTPEHQRDFIARDLGPTLANSTHHNVRLLMLDDQRLLLPHWAKVVLTDPEAAKYVHGIAVHWYLDFLAPAKATLGETHRLFPNTMLFASEACVGSKFWEQSVRLGSWDRGMQYSHSIITNLLYHVVGWTDWNLALNPEGGPNWVRNFVDSPIIVDITKDTFYKQPMFYHLGHFSKFIPEGSQRVGLVASQKNDLDAVALLHPDGSAVVVVLNRSSKDVPLTIKDPAVGFLETISPGYSIHTYLWRRQ

SEQ ID NO: 627 - DNA, 1614 bp, synthetic construct
  misc_feature 1..1614: note = Variant of B-Glucocerebrosidase
  source 1..1614: mol_type = other DNA
atggagttttcttctcctagtagagaagaatgccccaagccactgagcagggtgagcatcatggctggatccctcacagggctgcttcttttgcaggcagtctcatgggcctctggagccaggccctgtattcccaagtcattcggctactcctcagtggtgtgtgtatgcaatgccacctattgtgacagtttcgatccttggactctccctgctctgggtaccttctcccggtatgagagcacaagaagtggaagacgcatggagctctcaatgggccctatacaggctaaccacactgggacaggtctgctgctgaccctccaacctgaacagaagtttcagaaagtcaagggatttggaggagccatgactgatgcagcagcactcaacatcttggccctgtctccaccagcccagaatctgctgttgaagtcctacttctcagaggaggggattggctacaacatcatccgggttcccatggctagctgtgacttctccattaggacctatacatacgctgacacccccgatgattttcagctccataatttcagtctccctgaagaagacaccaaactgaagatacctctgattcacagagccttgcaactgtcccaaaggccagtgagcctcttcgcttctccctggactagtcctacatggctgaagactaatggtgctgttaatgggaaaggctccctgaaaggacagccaggtgacatatatcatcagacatgggcccgctactttgtgaaattccttgatgcctatgcagagcacaagctccaattctgggcagtcaccgcagaaaacgagccctcagctgggctgctgtctggctacccctttcagtgcttgggctttactcctgagcatcaacgggacttcattgcccgggatttggggccaacactggccaacagcacccaccacaatgtaagactcctcatgctggatgaccagaggctgctgctccctcattgggccaaggtggtgttgacagacccagaagctgccaaatatgttcatggcatcgctgtccactggtacctggattttttggcccctgcaaaggctactctgggagagacccacagactcttccccaataccatgctgtttgcatcagaagcctgcgtggggagcaaattctgggagcagtctgttaggctgggttcctgggatcggggcatgcaatattcccatagtataataactaacctcctctaccacgtggtaggatggacagactggaatctggctttgaacccagaaggaggccccaattgggtgcgcaactttgttgacagccccatcattgtggatatcacaaaggacaccttctacaaacagcctatgttctatcatctggggcactttagcaagttcattccagagggttcccagagagtaggcttggttgcctcacagaagaatgatctggatgctgtggcactcctgcatcctgacgggagtgcagtggtggtagtactgaacaggtctagcaaagatgttcccttgactatcaaagacccagctgtgggctttctggaaaccatttcccctggatactctatccacacctatctctggagaagacagtaatga

SEQ ID NO: 628 - protein, 536 aa, synthetic construct
  REGION 1..536: note = Variant of B-Glucocerebrosidase
MEFSSPSREECPKPLSRVSIMAGSLTGLLLLQAVSWASGARPCIPKSFGYSSVVCVCNATYCDSFDPWTLPALGTFSRYESTRSGRRMELSMGPIQANHTGTGLLLTLQPEQKFQKVKGFGGAMTDAAALNILALSPPAQNLLLKSYFSEEGIGYNIIRVPMASCDFSIRTYTYADTPDDFQLHNFSLPEEDTKLKIPLIHRALQLSQRPVSLFASPWTSPTWLKTNGAVNGKGSLKGQPGDIYHQTWARYFVKFLDAYAEHKLQFWAVTAENEPSAGLLSGYPFQCLGFTPEHQRDFIARDLGPTLANSTHHNVRLLMLDDQRLLLPHWAKVVLTDPEAAKYVHGIAVHWYLDFLAPAKATLGETHRLFPNTMLFASEACVGSKFWEQSVRLGSWDRGMQYSHSIITNLLYHVVGWTDWNLALNPEGGPNWVRNFVDSPIIVDITKDTFYKQPMFYHLGHFSKFIPEGSQRVGLVASQKNDLDAVALLHPDGSAVVVVLNRSSKDVPLTIKDPAVGFLETISPGYSIHTYLWRRQ

SEQ ID NO: 629 - DNA, 1614 bp, synthetic construct
  misc_feature 1..1614: note = Variant of B-Glucocerebrosidase
  source 1..1614: mol_type = other DNA
atggagttttcttctcctagtagagaagaatgccccaagccactgagcagggtgagcatcatggctggatccctcacagggctgcttcttttgcaggcagtctcatgggcctctggagccaggccctgtattcccaagtcattcggctactcctcagtggtgtgtgtatgcaatgccacctattgtgacagtttcgatcctccaactctccctgctctgggtaccttctcccggtatgagagcacaagaagtggaagacgcatggagctctcaatgggccctatacaggctaaccacactgggacaggtctgctgctgaccctccaacctgaacagaagtttcagaaagtcaagggatttggaggagccatgactgatgcagcagcactcaacatcttggccctgtctccaccagcccagaatctgctgttgaagtcctacttctcagaggaggggattggctacaacatcatccgggttcccatggctagctgtgacttctccattaggacctatacatacgctgacacccccgatgattttcagctccataatttcagtctctctgaagaagacaccaaactgaagatacctctgattcacagagccttgcaactgtcccaaaggccagtgagcctcttcgcttctccctggactagtcctacatggctgaagactaatggtgctgttaatgggaaaggctccctgaaaggacagccaggtgacatatatcatcagacatgggcccgctactttgtgaaattccttgatgcctatgcagagcacaagctccaattctgggcagtcaccgcagaaaacgagccctcagctgggctgctgtctggctacccctttcagtgcttgggctttactcctgagcatcaacgggacttcattgcccgggatttggggccaacactggccaacagcacccaccacaatgtaagactcctcatgctggatgaccagaggctgctgctccctcattgggccaaggtggtgttgacagacccagaagctgccaaatatgttcatggcatcgctgtccactggtacctggattttttggcccctgcaaaggctactctgggagagacccacagactcttccccaataccatgctgtttgcatcagaagcctgcgtggggagcaaattctgggagcagtctgttaggctgggttcctgggatcggggcatgcaatattcccatagtataataactaacctcctctaccacgtggtaggatggacagactggaatctggctttgaacccagaaggaggccccaattgggtgcgcaactttgttgacagccccatcattgtggatatcacaaaggacaccttctacaaacagcctatgttctatcatctggggcactttagcaagttcattccagagggttcccagagagtaggcttggttgcctcacagaagaatgatctggatgctgtggcactcctgcatcctgacgggagtgcagtggtggtagtactgaacaggtctagcaaagatgttcccttgactatcaaagacccagctgtgggctttctggaaaccatttcccctggatactctatccacacctatctctggagaagacagtaatga

SEQ ID NO: 630 - protein, 536 aa, synthetic construct
  REGION 1..536: note = Variant of B-Glucocerebrosidase
MEFSSPSREECPKPLSRVSIMAGSLTGLLLLQAVSWASGARPCIPKSFGYSSVVCVCNATYCDSFDPPTLPALGTFSRYESTRSGRRMELSMGPIQANHTGTGLLLTLQPEQKFQKVKGFGGAMTDAAALNILALSPPAQNLLLKSYFSEEGIGYNIIRVPMASCDFSIRTYTYADTPDDFQLHNFSLSEEDTKLKIPLIHRALQLSQRPVSLFASPWTSPTWLKTNGAVNGKGSLKGQPGDIYHQTWARYFVKFLDAYAEHKLQFWAVTAENEPSAGLLSGYPFQCLGFTPEHQRDFIARDLGPTLANSTHHNVRLLMLDDQRLLLPHWAKVVLTDPEAAKYVHGIAVHWYLDFLAPAKATLGETHRLFPNTMLFASEACVGSKFWEQSVRLGSWDRGMQYSHSIITNLLYHVVGWTDWNLALNPEGGPNWVRNFVDSPIIVDITKDTFYKQPMFYHLGHFSKFIPEGSQRVGLVASQKNDLDAVALLHPDGSAVVVVLNRSSKDVPLTIKDPAVGFLETISPGYSIHTYLWRRQ

SEQ ID NO: 631 - DNA, 1614 bp, synthetic construct
  misc_feature 1..1614: note = Variant of B-Glucocerebrosidase
  source 1..1614: mol_type = other DNA
atggagttttcttctcctagtagagaagaatgccccaagccactgagcagggtgagcatcatggctggatccctcacagggctgcttcttttgcaggcagtctcatgggcctctggagccaggccctgtattcccaagtcattcggctactcctcagtggtgtgtgtatgcaatgccacctattgtgacagtttcgatcctccaactctccctgctctgggtaccttctcccggtatgagagcacaagaagtggaagacgcatggagctctcaatgggccctatacaggctaaccacactgggacaggtctgctgctgaccctccaacctgaacagaagtttcagaaagtcaagggatttggaggagccatgactgatgcagcagcactcaacatcttggccctgtctccaccagcccagaatctgctgttgaagtcctacttctcagaggaggggattggctacaacatcatccgggttcccatggctagctgtgacttctccattaggacctatacatacgctgacacccccgatgattttcagctccataatttcagtctccctgaagaagacaccaaactgaagatacctctgattcacagagccttgcaactgtcccaaaggccagtgagcctcttcgcttctccctggactagtcctacatggctgaagactaatggtgctgttaatgggaaaggctccctgaaaggacagccaggtgacatatatcatcagacatgggcccgctactttgtgaaattccttgatgcctatgcagagcacaagctccaattctgggcagtcaccgcagaaaacgagccctcagctgggctgctgtctggctacccctttcagtgcttgggctttactcctgagcatcaacgggacttcattgcccgggatttggggccaacactggccaacagcacccaccacaatgtaagactcctcatgctggatgaccagaggctgctgctccctcattgggccaaggtggtgttgacagacccagaagctgccaaatatgttcatggcatcgctgtccactggtacctggattttttggcccctcctaaggctactctgggagagacccacagactcttccccaataccatgctgtttgcatcagaagcctgcgtggggagcaaattctgggagcagtctgttaggctgggttcctgggatcggggcatgcaatattcccatagtataataactaacctcctctaccacgtggtaggatggacagactggaatctggctttgaacccagaaggaggccccaattgggtgcgcaactttgttgacagccccatcattgtggatatcacaaaggacaccttctacaaacagcctatgttctatcatctggggcactttagcaagttcattccagagggttcccagagagtaggcttggttgcctcacagaagaatgatctggatgctgtggcactcctgcatcctgacgggagtgcagtggtggtagtactgaacaggtctagcaaagatgttcccttgactatcaaagacccagctgtgggctttctggaaaccatttcccctggatactctatccacacctatctctggagaagacagtaatga

SEQ ID NO: 632 - protein, 536 aa, synthetic construct
  REGION 1..536: note = Variant of B-Glucocerebrosidase
MEFSSPSREECPKPLSRVSIMAGSLTGLLLLQAVSWASGARPCIPKSFGYSSVVCVCNATYCDSFDPPTLPALGTFSRYESTRSGRRMELSMGPIQANHTGTGLLLTLQPEQKFQKVKGFGGAMTDAAALNILALSPPAQNLLLKSYFSEEGIGYNIIRVPMASCDFSIRTYTYADTPDDFQLHNFSLPEEDTKLKIPLIHRALQLSQRPVSLFASPWTSPTWLKTNGAVNGKGSLKGQPGDIYHQTWARYFVKFLDAYAEHKLQFWAVTAENEPSAGLLSGYPFQCLGFTPEHQRDFIARDLGPTLANSTHHNVRLLMLDDQRLLLPHWAKVVLTDPEAAKYVHGIAVHWYLDFLAPPKATLGETHRLFPNTMLFASEACVGSKFWEQSVRLGSWDRGMQYSHSIITNLLYHVVGWTDWNLALNPEGGPNWVRNFVDSPIIVDITKDTFYKQPMFYHLGHFSKFIPEGSQRVGLVASQKNDLDAVALLHPDGSAVVVVLNRSSKDVPLTIKDPAVGFLETISPGYSIHTYLWRRQ

SEQ ID NO: 633 - DNA, 1614 bp, synthetic construct
  misc_feature 1..1614: note = Variant of B-Glucocerebrosidase
  source 1..1614: mol_type = other DNA
atggagttttcttctcctagtagagaagaatgccccaagccactgagcagggtgagcatcatggctggatccctcacagggctgcttcttttgcaggcagtctcatgggcctctggagccaggccctgtattcccaagtcattcggctactcctcagtggtgtgtgtatgcaatgccacctattgtgacagtttcgatcctccaactctctatgctctgggtaccttctcccggtatgagagcacaagaagtggaagacgcatggagctctcaatgggccctatacaggctaaccacactgggacaggtctgctgctgaccctccaacctgaacagaagtttcagaaagtcaagggatttggaggagccatgactgatgcagcagcactcaacatcttggccctgtctccaccagcccagaatctgctgttgaagtcctacttctcagaggaggggattggctacaacatcatccgggttcccatggctagctgtgacttctccattaggacctatacatacgctgacacccccgatgattttcagctccataatttcagtctccctgaagaagacaccaaactgaagatacctctgattcacagagccttgcaactgtcccaaaggccagtgagcctcttcgcttctccctggactagtcctacatggctgaagactaatggtgctgttaatgggaaaggctccctgaaaggacagccaggtgacatatatcatcagacatgggcccgctactttgtgaaattccttgatgcctatgcagagcacaagctccaattctgggcagtcaccgcagaaaacgagccctcagctgggctgctgtctggctacccctttcagtgcttgggctttactcctgagcatcaacgggacttcattgcccgggatttggggccaacactggccaacagcacccaccacaatgtaagactcctcatgctggatgaccagaggctgctgctccctcattgggccaaggtggtgttgacagacccagaagctgccaaatatgttcatggcatcgctgtccactggtacctggattttttggcccctgcaaaggctactctgggagagacccacagactcttccccaataccatgctgtttgcatcagaagcctgcgtggggagcaaattctgggagcagtctgttaggctgggttcctgggatcggggcatgcaatattcccatagtataataactaacctcctctaccacgtggtaggatggacagactggaatctggctttgaacccagaaggaggccccaattgggtgcgcaactttgttgacagccccatcattgtggatatcacaaaggacaccttctacaaacagcctatgttctatcatctggggcactttagcaagttcattccagagggttcccagagagtaggcttggttgcctcacagaagaatgatctggatgctgtggcactcctgcatcctgacgggagtgcagtggtggtagtactgaacaggtctagcaaagatgttcccttgactatcaaagacccagctgtgggctttctggaaaccatttcccctggatactctatccacacctatctctggagaagacagtaatga

SEQ ID NO: 634 - protein, 536 aa, synthetic construct
  REGION 1..536: note = Variant of B-Glucocerebrosidase
MEFSSPSREECPKPLSRVSIMAGSLTGLLLLQAVSWASGARPCIPKSFGYSSVVCVCNATYCDSFDPPTLYALGTFSRYESTRSGRRMELSMGPIQANHTGTGLLLTLQPEQKFQKVKGFGGAMTDAAALNILALSPPAQNLLLKSYFSEEGIGYNIIRVPMASCDFSIRTYTYADTPDDFQLHNFSLPEEDTKLKIPLIHRALQLSQRPVSLFASPWTSPTWLKTNGAVNGKGSLKGQPGDIYHQTWARYFVKFLDAYAEHKLQFWAVTAENEPSAGLLSGYPFQCLGFTPEHQRDFIARDLGPTLANSTHHNVRLLMLDDQRLLLPHWAKVVLTDPEAAKYVHGIAVHWYLDFLAPAKATLGETHRLFPNTMLFASEACVGSKFWEQSVRLGSWDRGMQYSHSIITNLLYHVVGWTDWNLALNPEGGPNWVRNFVDSPIIVDITKDTFYKQPMFYHLGHFSKFIPEGSQRVGLVASQKNDLDAVALLHPDGSAVVVVLNRSSKDVPLTIKDPAVGFLETISPGYSIHTYLWRRQ

SEQ ID NO: 635 - DNA, 1614 bp, synthetic construct
  misc_feature 1..1614: note = Variant of B-Glucocerebrosidase
  source 1..1614: mol_type = other DNA
atggagttttcttctcctagtagagaagaatgccccaagccactgagcagggtgagcatcatggctggatccctcacagggctgcttcttttgcaggcagtctcatgggcctctggagccaggccctgtattcccaagtcattcggctactcctcagtggtgtgtgtatgcaatgccacctattgtgacagtttcgatcctccaactctccctgctctgggtaccttcactcggtatgagagcacaagaagtggaagacgcatggagctctcaatgggccctatacaggctaaccacactgggacaggtctgctgctgaccctccaacctgaacagaagtttcagaaagtcaagggatttggaggagccatgactgatgcagcagcactcaacatcttggccctgtctccaccagcccagaatctgctgttgaagtcctacttctcagaggaggggattggctacaacatcatccgggttcccatggctagctgtgacttctccattaggacctatacatacgctgacacccccgatgattttcagctccataatttcagtctccctgaagaagacaccaaactgaagatacctctgattcacagagccttgcaactgtcccaaaggccagtgagcctcttcgcttctccctggactagtcctacatggctgaagactaatggtgctgttaatgggaaaggctccctgaaaggacagccaggtgacatatatcatcagacatgggcccgctactttgtgaaattccttgatgcctatgcagagcacaagctccaattctgggcagtcaccgcagaaaacgagccctcagctgggctgctgtctggctacccctttcagtgcttgggctttactcctgagcatcaacgggacttcattgcccgggatttggggccaacactggccaacagcacccaccacaatgtaagactcctcatgctggatgaccagaggctgctgctccctcattgggccaaggtggtgttgacagacccagaagctgccaaatatgttcatggcatcgctgtccactggtacctggattttttggcccctgcaaaggctactctgggagagacccacagactcttccccaataccatgctgtttgcatcagaagcctgcgtggggagcaaattctgggagcagtctgttaggctgggttcctgggatcggggcatgcaatattcccatagtataataactaacctcctctaccacgtggtaggatggacagactggaatctggctttgaacccagaaggaggccccaattgggtgcgcaactttgttgacagccccatcattgtggatatcacaaaggacaccttctacaaacagcctatgttctatcatctggggcactttagcaagttcattccagagggttcccagagagtaggcttggttgcctcacagaagaatgatctggatgctgtggcactcctgcatcctgacgggagtgcagtggtggtagtactgaacaggtctagcaaagatgttcccttgactatcaaagacccagctgtgggctttctggaaaccatttcccctggatactctatccacacctatctctggagaagacagtaatga

SEQ ID NO: 636 - protein, 536 aa, synthetic construct
  REGION 1..536: note = Variant of B-Glucocerebrosidase
MEFSSPSREECPKPLSRVSIMAGSLTGLLLLQAVSWASGARPCIPKSFGYSSVVCVCNATYCDSFDPPTLPALGTFTRYESTRSGRRMELSMGPIQANHTGTGLLLTLQPEQKFQKVKGFGGAMTDAAALNILALSPPAQNLLLKSYFSEEGIGYNIIRVPMASCDFSIRTYTYADTPDDFQLHNFSLPEEDTKLKIPLIHRALQLSQRPVSLFASPWTSPTWLKTNGAVNGKGSLKGQPGDIYHQTWARYFVKFLDAYAEHKLQFWAVTAENEPSAGLLSGYPFQCLGFTPEHQRDFIARDLGPTLANSTHHNVRLLMLDDQRLLLPHWAKVVLTDPEAAKYVHGIAVHWYLDFLAPAKATLGETHRLFPNTMLFASEACVGSKFWEQSVRLGSWDRGMQYSHSIITNLLYHVVGWTDWNLALNPEGGPNWVRNFVDSPIIVDITKDTFYKQPMFYHLGHFSKFIPEGSQRVGLVASQKNDLDAVALLHPDGSAVVVVLNRSSKDVPLTIKDPAVGFLETISPGYSIHTYLWRRQ

SEQ ID NO: 637 - DNA, 1614 bp, synthetic construct
  misc_feature 1..1614: note = Variant of B-Glucocerebrosidase
  source 1..1614: mol_type = other DNA
atggagttttcttctcctagtagagaagaatgccccaagccactgagcagggtgagcatcatggctggatccctcacagggctgcttcttttgcaggcagtctcatgggcctctggagccaggccctgtattcccaagtcattcggctactcctcagtggtgtgtgtatgcaatgccacctattgtgacagtttcgatcctccaactctccctgctctgggtaccttctcccggtatgagagcacaagaagtggaagacgcatggagctctcaatgggccctatacaggctaaccacactgggacaggtctgctgctgaccctccaacctgaacagaagtttcagaaagtcaagggatttggaggagccatgactgatgcagcagcactcaacatcttggccctgtctccaccagcccagaatatgctgttgaagtcctacttctcagaggaggggattggctacaacatcatccgggttcccatggctagctgtgacttctccattaggacctatacatacgctgacacccccgatgattttcagctccataatttcagtctccctgaagaagacaccaaactgaagatacctctgattcacagagccttgcaactgtcccaaaggccagtgagcctcttcgcttctccctggactagtcctacatggctgaagactaatggtgctgttaatgggaaaggctccctgaaaggacagccaggtgacatatatcatcagacatgggcccgctactttgtgaaattccttgatgcctatgcagagcacaagctccaattctgggcagtcaccgcagaaaacgagccctcagctgggctgctgtctggctacccctttcagtgcttgggctttactcctgagcatcaacgggacttcattgcccgggatttggggccaacactggccaacagcacccaccacaatgtaagactcctcatgctggatgaccagaggctgctgctccctcattgggccaaggtggtgttgacagacccagaagctgccaaatatgttcatggcatcgctgtccactggtacctggattttttggcccctgcaaaggctactctgggagagacccacagactcttccccaataccatgctgtttgcatcagaagcctgcgtggggagcaaattctgggagcagtctgttaggctgggttcctgggatcggggcatgcaatattcccatagtataataactaacctcctctaccacgtggtaggatggacagactggaatctggctttgaacccagaaggaggccccaattgggtgcgcaactttgttgacagccccatcattgtggatatcacaaaggacaccttctacaaacagcctatgttctatcatctggggcactttagcaagttcattccagagggttcccagagagtaggcttggttgcctcacagaagaatgatctggatgctgtggcactcctgcatcctgacgggagtgcagtggtggtagtactgaacaggtctagcaaagatgttcccttgactatcaaagacccagctgtgggctttctggaaaccatttcccctggatactctatccacacctatctctggagaagacagtaatga

SEQ ID NO: 638 - protein, 536 aa, synthetic construct
  REGION 1..536: note = Variant of B-Glucocerebrosidase
MEFSSPSREECPKPLSRVSIMAGSLTGLLLLQAVSWASGARPCIPKSFGYSSVVCVCNATYCDSFDPPTLPALGTFSRYESTRSGRRMELSMGPIQANHTGTGLLLTLQPEQKFQKVKGFGGAMTDAAALNILALSPPAQNMLLKSYFSEEGIGYNIIRVPMASCDFSIRTYTYADTPDDFQLHNFSLPEEDTKLKIPLIHRALQLSQRPVSLFASPWTSPTWLKTNGAVNGKGSLKGQPGDIYHQTWARYFVKFLDAYAEHKLQFWAVTAENEPSAGLLSGYPFQCLGFTPEHQRDFIARDLGPTLANSTHHNVRLLMLDDQRLLLPHWAKVVLTDPEAAKYVHGIAVHWYLDFLAPAKATLGETHRLFPNTMLFASEACVGSKFWEQSVRLGSWDRGMQYSHSIITNLLYHVVGWTDWNLALNPEGGPNWVRNFVDSPIIVDITKDTFYKQPMFYHLGHFSKFIPEGSQRVGLVASQKNDLDAVALLHPDGSAVVVVLNRSSKDVPLTIKDPAVGFLETISPGYSIHTYLWRRQ

SEQ ID NO: 639 - DNA, 1614 bp, synthetic construct
  misc_feature 1..1614: note = Variant of B-Glucocerebrosidase
  source 1..1614: mol_type = other DNA
atggagttttcttctcctagtagagaagaatgccccaagccactgagcagggtgagcatcatggctggatccctcacagggctgcttcttttgcaggcagtctcatgggcctctggagccaggccctgtattcccaagtcattcggctactcctcagtggtgtgtgtatgcaatgccacctattgtgacagtttcgatcctccaactctccctgctctgggtaccttctcccggtatgagagcacaagaagtggaagacgcatggagctctcaatgggccctatacaggctaaccacactgggacaggtctgctgctgaccctccaacctgaacagaagtttcagaaagtcaagggatttggaggagccatgactgatgcagcagcactcaacatcttggccctgtctccaccagcccagaatctgctgttgaagtcctacttctcagaggaggggattggctacaacatcatccgggttcccatggctagctgtgacttctccattaggacctatacatacgctgacacccccgatgattttcagctccataatttcagtctccctgaagaagacaccaaactgaagatacctctgattcacagagccttgcaactgtcccaaaggccagtgagcctcttcgcttctccctggactagtcctacatggctgaagactaatggtgctgttaatgggaaaggctccctgaaaggacagccaggtgacatatatcatcagacatgggcccgctactttgtgaaattccttgatgcctatgcagagcacaagctccaattctgggcagtcaccgcagaaaacgagccctcagctgggctgctgtctggctacccctttcagtgcttgggctttactcctgagcatcaacgggacttcattgcccgggatttggggccaacactggccaacagcacccaccacaatgtaagactcctcatgctggatgaccagaggctgctgctccctcattgggccaaggtggtgttgacagacccagaagctgccaaatatgttcatggcatcgctgtccactggtacctggattttttggcccctgcaaaggctactctgggagagacccacagactcttccccaatgcgatgctgtttgcatcagaagcctgcgtggggagcaaattctgggagcagtctgttaggctgggttcctgggatcggggcatgcaatattcccatagtataataactaacctcctctaccacgtggtaggatggacagactggaatctggctttgaacccagaaggaggccccaattgggtgcgcaactttgttgacagccccatcattgtggatatcacaaaggacaccttctacaaacagcctatgttctatcatctggggcactttagcaagttcattccagagggttcccagagagtaggcttggttgcctcacagaagaatgatctggatgctgtggcactcctgcatcctgacgggagtgcagtggtggtagtactgaacaggtctagcaaagatgttcccttgactatcaaagacccagctgtgggctttctggaaaccatttcccctggatactctatccacacctatctctggagaagacagtaatga

SEQ ID NO: 640 - protein, 536 aa, synthetic construct
  REGION 1..536: note = Variant of B-Glucocerebrosidase
MEFSSPSREECPKPLSRVSIMAGSLTGLLLLQAVSWASGARPCIPKSFGYSSVVCVCNATYCDSFDPPTLPALGTFSRYESTRSGRRMELSMGPIQANHTGTGLLLTLQPEQKFQKVKGFGGAMTDAAALNILALSPPAQNLLLKSYFSEEGIGYNIIRVPMASCDFSIRTYTYADTPDDFQLHNFSLPEEDTKLKIPLIHRALQLSQRPVSLFASPWTSPTWLKTNGAVNGKGSLKGQPGDIYHQTWARYFVKFLDAYAEHKLQFWAVTAENEPSAGLLSGYPFQCLGFTPEHQRDFIARDLGPTLANSTHHNVRLLMLDDQRLLLPHWAKVVLTDPEAAKYVHGIAVHWYLDFLAPAKATLGETHRLFPNAMLFASEACVGSKFWEQSVRLGSWDRGMQYSHSIITNLLYHVVGWTDWNLALNPEGGPNWVRNFVDSPIIVDITKDTFYKQPMFYHLGHFSKFIPEGSQRVGLVASQKNDLDAVALLHPDGSAVVVVLNRSSKDVPLTIKDPAVGFLETISPGYSIHTYLWRRQ

SEQ ID NO: 641 - DNA, 1614 bp, synthetic construct
  misc_feature 1..1614: note = Variant of B-Glucocerebrosidase
  source 1..1614: mol_type = other DNA
atggagttttcttctcctagtagagaagaatgccccaagccactgagcagggtgagcatcatggctggatccctcacagggctgcttcttttgcaggcagtctcatgggcctctggagccaggccctgtattcccaagtcattcggctactcctcagtggtgtgtgtatgcaatgccacctattgtgacagtttcgatcctccaactctccctgctctgggtaccttctcccggtatgagagcacaagaagtggaagacgcatggagctctcaatgggccctatacaggctaaccacactgggacaggtctgctgctgaccctccaacctgaacagaagtttcagaaagtcaagggatttggaggagccatgactgatgcagcagcactcaacatcttggccctgtctccaccagcccagaatctgctgttgaagtcctacttctcagaggaggggattggctacaacatcatccgggttcccatggctagctgtgacttctccattaggacctatacatacgctgacacccccgatgattttcagctccataatttcagtctccctgaagaagacaccaaactgaagatacctctgattcacagagccttgcaactgtcccaaaggccagtgagcctcttcgcttctccctggactagtcctacatggctgaagactaatggtgctgttaatgggaaaggctccctgaaaggacagccaggtgacatatatcatcagacatgggcccgctactttgtgaaattccttgatgcctatgcagagcacaagctccaattctgggcagtcaccgcagaaaacgagccctcagctgggctgctgtctggctacccctttcagtgcttgggctttactcctgagcatcaacgggacttcattgcccgggatttggggccaacactggccaacagcacccaccacaatgtaagactcctcgttctggatgaccagaggctgctgctccctcattgggccaaggtggtgttgacagacccagaagctgccaaatatgttcatggcatcgctgtccactggtacctggattttttggcccctgcaaaggctactctgggagagacccacagactcttccccaataccatgctgtttgcatcagaagcctgcgtggggagcaaattctgggagcagtctgttaggctgggttcctgggatcggggcatgcaatattcccatagtataataactaacctcctctaccacgtggtaggatggacagactggaatctggctttgaacccagaaggaggccccaattgggtgcgcaactttgttgacagccccatcattgtggatatcacaaaggacaccttctacaaacagcctatgttctatcatctggggcactttagcaagttcattccagagggttcccagagagtaggcttggttgcctcacagaagaatgatctggatgctgtggcactcctgcatcctgacgggagtgcagtggtggtagtactgaacaggtctagcaaagatgttcccttgactatcaaagacccagctgtgggctttctggaaaccatttcccctggatactctatccacacctatctctggagaagacagtaatga

SEQ ID NO: 642 - protein, 536 aa, synthetic construct
  REGION 1..536: note = Variant of B-Glucocerebrosidase
MEFSSPSREECPKPLSRVSIMAGSLTGLLLLQAVSWASGARPCIPKSFGYSSVVCVCNATYCDSFDPPTLPALGTFSRYESTRSGRRMELSMGPIQANHTGTGLLLTLQPEQKFQKVKGFGGAMTDAAALNILALSPPAQNLLLKSYFSEEGIGYNIIRVPMASCDFSIRTYTYADTPDDFQLHNFSLPEEDTKLKIPLIHRALQLSQRPVSLFASPWTSPTWLKTNGAVNGKGSLKGQPGDIYHQTWARYFVKFLDAYAEHKLQFWAVTAENEPSAGLLSGYPFQCLGFTPEHQRDFIARDLGPTLANSTHHNVRLLVLDDQRLLLPHWAKVVLTDPEAAKYVHGIAVHWYLDFLAPAKATLGETHRLFPNTMLFASEACVGSKFWEQSVRLGSWDRGMQYSHSIITNLLYHVVGWTDWNLALNPEGGPNWVRNFVDSPIIVDITKDTFYKQPMFYHLGHFSKFIPEGSQRVGLVASQKNDLDAVALLHPDGSAVVVVLNRSSKDVPLTIKDPAVGFLETISPGYSIHTYLWRRQ

SEQ ID NO: 643 - DNA, 1614 bp, synthetic construct
  misc_feature 1..1614: note = Variant of B-Glucocerebrosidase
  source 1..1614: mol_type = other DNA
atggagttttcttctcctagtagagaagaatgccccaagccactgagcagggtgagcatcatggctggatccctcacagggctgcttcttttgcaggcagtctcatgggcctctggagccaggccctgtattcccaagtcattcggctactcctcagtggtgtgtgtatgcaatgccacctattgtgacagtttcgatcctccaactctccctgctctgggtaccttctcccggtatgagagcacaagaagtggaagacgcatggagctctcaatgggccctatacaggctaaccacactgggacaggtctgctgctgaccctccaacctgaacagaagtttcagaaagtcaagggatttggaggagccatgactgatgcagcagcactcaacatcttggccctgtctccaccagcccagaatctgctgttgaagtcctacttctcagaggaggggattggctacaacatcatccgggttcccatggctagctgtgacttctccattaggacctatacatacgctgacacccccgatgattttcagctccataatttcagtctccctgaagaagacaccaaactgaagatacctctgattcacagagccttgcaactgtcccaaaggccagtgaatctcttcgcttctccctggactagtcctacatggctgaagactaatggtgctgttaatgggaaaggctccctgaaaggacagccaggtgacatatatcatcagacatgggcccgctactttgtgaaattccttgatgcctatgcagagcacaagctccaattctgggcagtcaccgcagaaaacgagccctcagctgggctgctgtctggctacccctttcagtgcttgggctttactcctgagcatcaacgggacttcattgcccgggatttggggccaacactggccaacagcacccaccacaatgtaagactcctcatgctggatgaccagaggctgctgctccctcattgggccaaggtggtgttgacagacccagaagctgccaaatatgttcatggcatcgctgtccactggtacctggattttttggcccctgcaaaggctactctgggagagacccacagactcttccccaataccatgctgtttgcatcagaagcctgcgtggggagcaaattctgggagcagtctgttaggctgggttcctgggatcggggcatgcaatattcccatagtataataactaacctcctctaccacgtggtaggatggacagactggaatctggctttgaacccagaaggaggccccaattgggtgcgcaactttgttgacagccccatcattgtggatatcacaaaggacaccttctacaaacagcctatgttctatcatctggggcactttagcaagttcattccagagggttcccagagagtaggcttggttgcctcacagaagaatgatctggatgctgtggcactcctgcatcctgacgggagtgcagtggtggtagtactgaacaggtctagcaaagatgttcccttgactatcaaagacccagctgtgggctttctggaaaccatttcccctggatactctatccacacctatctctggagaagacagtaatga

SEQ ID NO: 644 - protein, 536 aa, synthetic construct
  REGION 1..536: note = Variant of B-Glucocerebrosidase
MEFSSPSREECPKPLSRVSIMAGSLTGLLLLQAVSWASGARPCIPKSFGYSSVVCVCNATYCDSFDPPTLPALGTFSRYESTRSGRRMELSMGPIQANHTGTGLLLTLQPEQKFQKVKGFGGAMTDAAALNILALSPPAQNLLLKSYFSEEGIGYNIIRVPMASCDFSIRTYTYADTPDDFQLHNFSLPEEDTKLKIPLIHRALQLSQRPVNLFASPWTSPTWLKTNGAVNGKGSLKGQPGDIYHQTWARYFVKFLDAYAEHKLQFWAVTAENEPSAGLLSGYPFQCLGFTPEHQRDFIARDLGPTLANSTHHNVRLLMLDDQRLLLPHWAKVVLTDPEAAKYVHGIAVHWYLDFLAPAKATLGETHRLFPNTMLFASEACVGSKFWEQSVRLGSWDRGMQYSHSIITNLLYHVVGWTDWNLALNPEGGPNWVRNFVDSPIIVDITKDTFYKQPMFYHLGHFSKFIPEGSQRVGLVASQKNDLDAVALLHPDGSAVVVVLNRSSKDVPLTIKDPAVGFLETISPGYSIHTYLWRRQ

SEQ ID NO: 645 - DNA, 1614 bp, synthetic construct
  misc_feature 1..1614: note = Variant of B-Glucocerebrosidase
  source 1..1614: mol_type = other DNA
atggagttttcttctcctagtagagaagaatgccccaagccactgagcagggtgagcatcatggctggatccctcacagggctgcttcttttgcaggcagtctcatgggcctctggagccaggccctgtattcccaagtcattcggctactcctcagtggtgtgtgtatgcaatgccacctattgtgacagtttcgatcctccaactctccctgctctgggtaccttctcccggtatgagagcacaagaagtggaagacgcatggagctctcaatgggccctatacaggctaaccacactgggacaggtctgctgctgaccctccaacatgaacagaagtttcagaaagtcaagggatttggaggagccatgactgatgcagcagcactcaacatcttggccctgtctccaccagcccagaatctgctgttgaagtcctacttctcagaggaggggattggctacaacatcatccgggttcccatggctagctgtgacttctccattaggacctatacatacgctgacacccccgatgattttcagctccataatttcagtctccctgaagaagacaccaaactgaagatacctctgattcacagagccttgcaactgtcccaaaggccagtgagcctcttcgcttctccctggactagtcctacatggctgaagactaatggtgctgttaatgggaaaggctccctgaaaggacagccaggtgacatatatcatcagacatgggcccgctactttgtgaaattccttgatgcctatgcagagcacaagctccaattctgggcagtcaccgcagaaaacgagccctcagctgggctgctgtctggctacccctttcagtgcttgggctttactcctgagcatcaacgggacttcattgcccgggatttggggccaacactggccaacagcacccaccacaatgtaagactcctcatgctggatgaccagaggctgctgctccctcattgggccaaggtggtgttgacagacccagaagctgccaaatatgttcatggcatcgctgtccactggtacctggattttttggcccctgcaaaggctactctgggagagacccacagactcttccccaataccatgctgtttgcatcagaagcctgcgtggggagcaaattctgggagcagtctgttaggctgggttcctgggatcggggcatgcaatattcccatagtataataactaacctcctctaccacgtggtaggatggacagactggaatctggctttgaacccagaaggaggccccaattgggtgcgcaactttgttgacagccccatcattgtggatatcacaaaggacaccttctacaaacagcctatgttctatcatctggggcactttagcaagttcattccagagggttcccagagagtaggcttggttgcctcacagaagaatgatctggatgctgtggcactcctgcatcctgacgggagtgcagtggtggtagtactgaacaggtctagcaaagatgttcccttgactatcaaagacccagctgtgggctttctggaaaccatttcccctggatactctatccacacctatctctggagaagacagtaatga

SEQ ID NO: 646 - protein, 536 aa, synthetic construct
  REGION 1..536: note = Variant of B-Glucocerebrosidase
MEFSSPSREECPKPLSRVSIMAGSLTGLLLLQAVSWASGARPCIPKSFGYSSVVCVCNATYCDSFDPPTLPALGTFSRYESTRSGRRMELSMGPIQANHTGTGLLLTLQHEQKFQKVKGFGGAMTDAAALNILALSPPAQNLLLKSYFSEEGIGYNIIRVPMASCDFSIRTYTYADTPDDFQLHNFSLPEEDTKLKIPLIHRALQLSQRPVSLFASPWTSPTWLKTNGAVNGKGSLKGQPGDIYHQTWARYFVKFLDAYAEHKLQFWAVTAENEPSAGLLSGYPFQCLGFTPEHQRDFIARDLGPTLANSTHHNVRLLMLDDQRLLLPHWAKVVLTDPEAAKYVHGIAVHWYLDFLAPAKATLGETHRLFPNTMLFASEACVGSKFWEQSVRLGSWDRGMQYSHSIITNLLYHVVGWTDWNLALNPEGGPNWVRNFVDSPIIVDITKDTFYKQPMFYHLGHFSKFIPEGSQRVGLVASQKNDLDAVALLHPDGSAVVVVLNRSSKDVPLTIKDPAVGFLETISPGYSIHTYLWRRQ

SEQ ID NO: 647 - DNA, 1614 bp, synthetic construct
  misc_feature 1..1614: note = Variant of B-Glucocerebrosidase
  source 1..1614: mol_type = other DNA
atggagttttcttctcctagtagagaagaatgccccaagccactgagcagggtgagcatcatggctggatccctcacagggctgcttcttttgcaggcagtctcatgggcctctggagccaggccctgtattcccaagtcattcggctactcctcagtggtgtgtgtatgcaatgccacctattgtgacagtttcgatcctccaactctccctgctctgggtaccttctcccggtatgagagcacaagaagtggaagacgcatggagctctcaatgggccctatacaggctaaccacactgggacaggtctgctgctgaccctccaacctgaacagaagtttcagaaagtcaagggatttggaggagccatgactgatgcagcagcactcaacatcttggccctgtctccaccagcccagaatctgctgttgaagtcctacttctcagaggaggggattggctacaacatcatccgggttcccatggctagctgtgacttctccattaggacctatacatacgctgacacccccgatgattttcagctccataatttcagtctccctgaagaagacaccaaactgaagatacctctgattcacagagccttgcaactgtcccaaaggccagtgagcctcttcgcttctccctggactagtcctacatggctgaagactaatggtgctgttaatgggaaaggctccctgaaaggacagccaggtgacatatatcatcagacatgggcccgctactttgtgaaattccttgatgcctatgcagagcacaagctccaattctgggcagtcaccgcagaaaacgagccctcagctgggctgctgtctggctacccctttcagtgcttgggctttactcctgagcatcaacgggacttcattgcccgggatttggggccaacactggccaacagcacccaccacaatgtaagactcctcatgctggatgaccagaggctgctgctccctcattgggccaagtgtgtgttgacagacccagaagctgccaaatatgttcatggcatcgctgtccactggtacctggattttttggcccctgcaaaggctactctgggagagacccacagactcttccccaataccatgctgtttgcatcagaagcctgcgtggggagcaaattctgggagcagtctgttaggctgggttcctgggatcggggcatgcaatattcccatagtataataactaacctcctctaccacgtggtaggatggacagactggaatctggctttgaacccagaaggaggccccaattgggtgcgcaactttgttgacagccccatcattgtggatatcacaaaggacaccttctacaaacagcctatgttctatcatctggggcactttagcaagttcattccagagggttcccagagagtaggcttggttgcctcacagaagaatgatctggatgctgtggcactcctgcatcctgacgggagtgcagtggtggtagtactgaacaggtctagcaaagatgttcccttgactatcaaagacccagctgtgggctttctggaaaccatttcccctggatactctatccacacctatctctggagaagacagtaatga

SEQ ID NO: 648 - protein, 536 aa, synthetic construct
  REGION 1..536: note = Variant of B-Glucocerebrosidase
MEFSSPSREECPKPLSRVSIMAGSLTGLLLLQAVSWASGARPCIPKSFGYSSVVCVCNATYCDSFDPPTLPALGTFSRYESTRSGRRMELSMGPIQANHTGTGLLLTLQPEQKFQKVKGFGGAMTDAAALNILALSPPAQNLLLKSYFSEEGIGYNIIRVPMASCDFSIRTYTYADTPDDFQLHNFSLPEEDTKLKIPLIHRALQLSQRPVSLFASPWTSPTWLKTNGAVNGKGSLKGQPGDIYHQTWARYFVKFLDAYAEHKLQFWAVTAENEPSAGLLSGYPFQCLGFTPEHQRDFIARDLGPTLANSTHHNVRLLMLDDQRLLLPHWAKCVLTDPEAAKYVHGIAVHWYLDFLAPAKATLGETHRLFPNTMLFASEACVGSKFWEQSVRLGSWDRGMQYSHSIITNLLYHVVGWTDWNLALNPEGGPNWVRNFVDSPIIVDITKDTFYKQPMFYHLGHFSKFIPEGSQRVGLVASQKNDLDAVALLHPDGSAVVVVLNRSSKDVPLTIKDPAVGFLETISPGYSIHTYLWRRQ

SEQ ID NO: 649 - DNA, 1614 bp, synthetic construct
  misc_feature 1..1614: note = Variant of B-Glucocerebrosidase
  source 1..1614: mol_type = other DNA
atggagttttcttctcctagtagagaagaatgccccaagccactgagcagggtgagcatcatggctggatccctcacagggctgcttcttttgcaggcagtctcatgggcctctggagccaggccctgtattcccaagtcattcggctactcctcagtggtgtgtgtatgcaatgccacctattgtgacagtttcgatcctccaactctccctgctctgggtaccttctcccggtatgagagcacaagaagtggaagacgcatggagctctcaatgggccctatacaggctaaccacactgggacaggtctgctgctgaccctccaacctgaacagaagtttcagaaagtcaagggatttggaggagccatgactgatgcagcagcactcaacatcttggccctgtctccaccagcccagaatctgctgttgaagtcctacttctcagaggaggggattggctacaacatcatccgggttcccatggctagctgtgacttctccattaggacctatacatacgctgacacccccgatgattttcagctccataatttcagtctccctgaagaagacaccaaactgaagatacctctgattcacagagccttgcaactgtcccaaaggccagtgagcctcttcgcttctccctggactagtcctacatggctgaagactaatggtgctgttaatgggaaaggctccctgaaaggacagccaggtgacatatatcatcagacatgggcccgctactttgtgaaattccttgatgcctatgcagagcacaagctccaattctgggcagtcaccgcagaaaacgagccctcagctgggctgctgtctggctacccctttcagtgcttgggctttactcctgagcatcaacgggacttcattgcccgggatttggggccaacactggccaacagcacccaccacaatgtaagactcctcatgctggatgaccagaggctgctgctccctcattgggccaaggtggtgttgacagacccagaagctgccaaatatgttcatggcatcgctgtccactggtacctggattttttggcccctgcaaaggctactctgggagagacccacagactcttccccaataccatgctgtttgcatcagaagcctgcgtggggagcaaattctgggagcagtctgttaggctgggttcctgggatcggggcatgcaatattcccatagtataataactaacctcctctaccacgtggtaggatggacagactggaatctggctttgaacccagaaggaggccccaattgggtgcgcaactttgttgacagccccatcattgtggatatcacaaaggacaccttctacaaacagcctatgttctatcatctggggcactttagcaagttcattccagagggttcccagagagtaggcttggttgcctcacagaagaatgatctggatgctgtggcactcctgattcctgacgggagtgcagtggtggtagtactgaacaggtctagcaaagatgttcccttgactatcaaagacccagctgtgggctttctggaaaccatttcccctggatactctatccacacctatctctggagaagacagtaatga

SEQ ID NO: 650 - protein, 536 aa, synthetic construct
  REGION 1..536: note = Variant of B-Glucocerebrosidase
MEFSSPSREECPKPLSRVSIMAGSLTGLLLLQAVSWASGARPCIPKSFGYSSVVCVCNATYCDSFDPPTLPALGTFSRYESTRSGRRMELSMGPIQANHTGTGLLLTLQPEQKFQKVKGFGGAMTDAAALNILALSPPAQNLLLKSYFSEEGIGYNIIRVPMASCDFSIRTYTYADTPDDFQLHNFSLPEEDTKLKIPLIHRALQLSQRPVSLFASPWTSPTWLKTNGAVNGKGSLKGQPGDIYHQTWARYFVKFLDAYAEHKLQFWAVTAENEPSAGLLSGYPFQCLGFTPEHQRDFIARDLGPTLANSTHHNVRLLMLDDQRLLLPHWAKVVLTDPEAAKYVHGIAVHWYLDFLAPAKATLGETHRLFPNTMLFASEACVGSKFWEQSVRLGSWDRGMQYSHSIITNLLYHVVGWTDWNLALNPEGGPNWVRNFVDSPIIVDITKDTFYKQPMFYHLGHFSKFIPEGSQRVGLVASQKNDLDAVALLIPDGSAVVVVLNRSSKDVPLTIKDPAVGFLETISPGYSIHTYLWRRQ

SEQ ID NO: 651 - DNA, 1614 bp, synthetic construct
  misc_feature 1..1614: note = Variant of B-Glucocerebrosidase
  source 1..1614: mol_type = other DNA
atggagttttcttctcctagtagagaagaatgccccaagccactgagcagggtgagcatcatggctggatccctcacagggctgcttcttttgcaggcagtctcatgggcctctggagccaggccctgtattcccaagtcattcggctactcctcagtggtgtgtgtatgcaatgccacctattgtgacagtttcgatccttttactctccctgctctgggtaccttctcccggtatgagagcacaagaagtggaagacgcatggagctctcaatgggccctatacaggctaaccacactgggacaggtctgctgctgaccctccaacctgaacagaagtttcagaaagtcaagggatttggaggagccatgactgatgcagcagcactcaacatcttggccctgtctccaccagcccagaatctgctgttgaagtcctacttctcagaggaggggattggctacaacatcatccgggttcccatggctagctgtgacttctccattaggacctatacatacgctgacacccccgatgattttcagctccataatttcagtctccctgaagaagacaccaaactgaagatacctctgattcacagagccttgcaactgtcccaaaggccagtgagcctcttcgcttctccctggactagtcctacatggctgaagactaatggtgctgttaatgggaaaggctccctgaaaggacagccaggtgacatatatcatcagacatgggcccgctactttgtgaaattccttgatgcctatgcagagcacaagctccaattctgggcagtcaccgcagaaaacgagccctcagctgggctgctgtctggctacccctttcagtgcttgggctttactcctgagcatcaacgggacttcattgcccgggatttggggccaacactggccaacagcacccaccacaatgtaagactcctcatgctggatgaccagaggctgctgctccctcattgggccaaggtggtgttgacagacccagaagctgccaaatatgttcatggcatcgctgtccactggtacctggattttttggcccctgcaaaggctactctgggagagacccacagactcttccccaataccatgctgtttgcatcagaagcctgcgtggggagcaaattctgggagcagtctgttaggctgggttcctgggatcggggcatgcaatattcccatagtataataactaacctcctctaccacgtggtaggatggacagactggaatctggctttgaacccagaaggaggccccaattgggtgcgcaactttgttgacagccccatcattgtggatatcacaaaggacaccttctacaaacagcctatgttctatcatctggggcactttagcaagttcattccagagggttcccagagagtaggcttggttgcctcacagaagaatgatctggatgctgtggcactcctgcatcctgacgggagtgcagtggtggtagtactgaacaggtctagcaaagatgttcccttgactatcaaagacccagctgtgggctttctggaaaccatttcccctggatactctatccacacctatctctggagaagacagtaatga

SEQ ID NO: 652 - protein, 536 aa, synthetic construct
  REGION 1..536: note = Variant of B-Glucocerebrosidase
MEFSSPSREECPKPLSRVSIMAGSLTGLLLLQAVSWASGARPCIPKSFGYSSVVCVCNATYCDSFDPFTLPALGTFSRYESTRSGRRMELSMGPIQANHTGTGLLLTLQPEQKFQKVKGFGGAMTDAAALNILALSPPAQNLLLKSYFSEEGIGYNIIRVPMASCDFSIRTYTYADTPDDFQLHNFSLPEEDTKLKIPLIHRALQLSQRPVSLFASPWTSPTWLKTNGAVNGKGSLKGQPGDIYHQTWARYFVKFLDAYAEHKLQFWAVTAENEPSAGLLSGYPFQCLGFTPEHQRDFIARDLGPTLANSTHHNVRLLMLDDQRLLLPHWAKVVLTDPEAAKYVHGIAVHWYLDFLAPAKATLGETHRLFPNTMLFASEACVGSKFWEQSVRLGSWDRGMQYSHSIITNLLYHVVGWTDWNLALNPEGGPNWVRNFVDSPIIVDITKDTFYKQPMFYHLGHFSKFIPEGSQRVGLVASQKNDLDAVALLHPDGSAVVVVLNRSSKDVPLTIKDPAVGFLETISPGYSIHTYLWRRQ

SEQ ID NO: 653 - DNA, 1614 bp, synthetic construct
  misc_feature 1..1614: note = Variant of B-Glucocerebrosidase
  source 1..1614: mol_type = other DNA
atggagttttcttctcctagtagagaagaatgccccaagccactgagcagggtgagcatcatggctggatccctcacagggctgcttcttttgcaggcagtctcatgggcctctggagccaggccctgtattcccaagtcattcggctactcctcagtggtgtgtgtatgcaatgccacctattgtgacagtttcgatcctccaactctccctgctctgggtaccttctcccggtatgagagcacaagaagtggaagacgcatggagctctcaatgggccctatacaggctaaccacactgggacaggtctgctgctgaccctccaacctgaacagaagtttcagaaagtcaagggatttggaggagccatgactgatgcagcagcactcaacatcttggccctgtctccaccagcccagaatctgctgttgaagtcctacttctcagaggaggggattggctacaacatcatccgggttcccatggctagctgtgacttctccattaggacctatacatacgctgacacccccgatgattttcagctccataatttcagtctccctgaagaagacaccaaactgaagatacctctgattcacagagccttgcaactgtcccaaaggccagtgagcctcttcgcttctccctggactagtcctacatggctgaagactaatggtgctgttaatgggaaaggctccctgaaaggacagccaggtgacatatatcatcagacatgggcccgctactttgtgaaattccttgatgcctatgcagagcacaagctccaattctgggcagtcaccgcagaaaacgagccctcagctgggctgctgtctggctacccctttcagtgcttgggctttactcctgagcatcaacgggacttcattgcccgggatttggggccaacactggccaacagcacccaccacaatgtaagactcctcatgctggatgaccagaggctgctgctccctcattgggccaaggtggtgttgacagacccagaagctgccaaatatgttcatggcatcgctgtccactggtacctggattttttggcccctgcaaaggctactctgggagagacccacagactcttccccaataccatgctgtttgcatcagaagcctgcgtggggagcaaattctgggagcagtctgttaggctgggttcctgggatcggggcatgcaatattcccatagtataataactaacctcctctaccacgtggtaggatggacagactggaatctggctttgaacccagaaggaggccccaattgggtgcgcaactttgttgacagccccatcattgtggatatcacaaaggacaccttctacaaacagcctatgttctatcatctggggcactttagcaagttcattccagagggttcccagagagtatcgttggttgcctcacagaagaatgatctggatgctgtggcactcctgcatcctgacgggagtgcagtggtggtagtactgaacaggtctagcaaagatgttcccttgactatcaaagacccagctgtgggctttctggaaaccatttcccctggatactctatccacacctatctctggagaagacagtaatga

SEQ ID NO: 654 - protein, 536 aa, synthetic construct
  REGION 1..536: note = Variant of B-Glucocerebrosidase
MEFSSPSREECPKPLSRVSIMAGSLTGLLLLQAVSWASGARPCIPKSFGYSSVVCVCNATYCDSFDPPTLPALGTFSRYESTRSGRRMELSMGPIQANHTGTGLLLTLQPEQKFQKVKGFGGAMTDAAALNILALSPPAQNLLLKSYFSEEGIGYNIIRVPMASCDFSIRTYTYADTPDDFQLHNFSLPEEDTKLKIPLIHRALQLSQRPVSLFASPWTSPTWLKTNGAVNGKGSLKGQPGDIYHQTWARYFVKFLDAYAEHKLQFWAVTAENEPSAGLLSGYPFQCLGFTPEHQRDFIARDLGPTLANSTHHNVRLLMLDDQRLLLPHWAKVVLTDPEAAKYVHGIAVHWYLDFLAPAKATLGETHRLFPNTMLFASEACVGSKFWEQSVRLGSWDRGMQYSHSIITNLLYHVVGWTDWNLALNPEGGPNWVRNFVDSPIIVDITKDTFYKQPMFYHLGHFSKFIPEGSQRVSLVASQKNDLDAVALLHPDGSAVVVVLNRSSKDVPLTIKDPAVGFLETISPGYSIHTYLWRRQ

SEQ ID NO: 655 - DNA, 1614 bp, synthetic construct
  misc_feature 1..1614: note = Variant of B-Glucocerebrosidase
  source 1..1614: mol_type = other DNA
atggagttttcttctcctagtagagaagaatgccccaagccactgagcagggtgagcatcatggctggatccctcacagggctgcttcttttgcaggcagtctcatgggcctctggagccaggccctgtattcccaagtcattcggctactcctcagtggtgtgtgtatgcaatgccacctattgtgacagtttcgatcctccaactctccctgctctgggtaccttctcccggtatgagagcacaagaagtggaagacgcatggagctctcaatgggccctatacaggctaaccacactgggacacttctgctgctgaccctccaacctgaacagaagtttcagaaagtcaagggatttggaggagccatgactgatgcagcagcactcaacatcttggccctgtctccaccagcccagaatctgctgttgaagtcctacttctcagaggaggggattggctacaacatcatccgggttcccatggctagctgtgacttctccattaggacctatacatacgctgacacccccgatgattttcagctccataatttcagtctccctgaagaagacaccaaactgaagatacctctgattcacagagccttgcaactgtcccaaaggccagtgagcctcttcgcttctccctggactagtcctacatggctgaagactaatggtgctgttaatgggaaaggctccctgaaaggacagccaggtgacatatatcatcagacatgggcccgctactttgtgaaattccttgatgcctatgcagagcacaagctccaattctgggcagtcaccgcagaaaacgagccctcagctgggctgctgtctggctacccctttcagtgcttgggctttactcctgagcatcaacgggacttcattgcccgggatttggggccaacactggccaacagcacccaccacaatgtaagactcctcatgctggatgaccagaggctgctgctccctcattgggccaaggtggtgttgacagacccagaagctgccaaatatgttcatggcatcgctgtccactggtacctggattttttggcccctgcaaaggctactctgggagagacccacagactcttccccaataccatgctgtttgcatcagaagcctgcgtggggagcaaattctgggagcagtctgttaggctgggttcctgggatcggggcatgcaatattcccatagtataataactaacctcctctaccacgtggtaggatggacagactggaatctggctttgaacccagaaggaggccccaattgggtgcgcaactttgttgacagccccatcattgtggatatcacaaaggacaccttctacaaacagcctatgttctatcatctggggcactttagcaagttcattccagagggttcccagagagtaggcttggttgcctcacagaagaatgatctggatgctgtggcactcctgcatcctgacgggagtgcagtggtggtagtactgaacaggtctagcaaagatgttcccttgactatcaaagacccagctgtgggctttctggaaaccatttcccctggatactctatccacacctatctctggagaagacagtaatga

SEQ ID NO: 656 - protein, 536 aa, synthetic construct
  REGION 1..536: note = Variant of B-Glucocerebrosidase
MEFSSPSREECPKPLSRVSIMAGSLTGLLLLQAVSWASGARPCIPKSFGYSSVVCVCNATYCDSFDPPTLPALGTFSRYESTRSGRRMELSMGPIQANHTGTLLLLTLQPEQKFQKVKGFGGAMTDAAALNILALSPPAQNLLLKSYFSEEGIGYNIIRVPMASCDFSIRTYTYADTPDDFQLHNFSLPEEDTKLKIPLIHRALQLSQRPVSLFASPWTSPTWLKTNGAVNGKGSLKGQPGDIYHQTWARYFVKFLDAYAEHKLQFWAVTAENEPSAGLLSGYPFQCLGFTPEHQRDFIARDLGPTLANSTHHNVRLLMLDDQRLLLPHWAKVVLTDPEAAKYVHGIAVHWYLDFLAPAKATLGETHRLFPNTMLFASEACVGSKFWEQSVRLGSWDRGMQYSHSIITNLLYHVVGWTDWNLALNPEGGPNWVRNFVDSPIIVDITKDTFYKQPMFYHLGHFSKFIPEGSQRVGLVASQKNDLDAVALLHPDGSAVVVVLNRSSKDVPLTIKDPAVGFLETISPGYSIHTYLWRRQ

SEQ ID NO: 657 - DNA, 1614 bp, synthetic construct
  misc_feature 1..1614: note = Variant of B-Glucocerebrosidase
  source 1..1614: mol_type = other DNA
atggagttttcttctcctagtagagaagaatgccccaagccactgagcagggtgagcatcatggctggatccctcacagggctgcttcttttgcaggcagtctcatgggcctctggagccaggccctgtattcccaagtcattcggctactcctcagtggtgtgtgtatgcaatgccacctattgtgacagtttcgatcctccaactctccctgctctgggtaccttccatcggtatgagagcacaagaagtggaagacgcatggagctctcaatgggccctatacaggctaaccacactgggacaggtctgctgctgaccctccaacctgaacagaagtttcagaaagtcaagggatttggaggagccatgactgatgcagcagcactcaacatcttggccctgtctccaccagcccagaatctgctgttgaagtcctacttctcagaggaggggattggctacaacatcatccgggttcccatggctagctgtgacttctccattaggacctatacatacgctgacacccccgatgattttcagctccataatttcagtctccctgaagaagacaccaaactgaagatacctctgattcacagagccttgcaactgtcccaaaggccagtgagcctcttcgcttctccctggactagtcctacatggctgaagactaatggtgctgttaatgggaaaggctccctgaaaggacagccaggtgacatatatcatcagacatgggcccgctactttgtgaaattccttgatgcctatgcagagcacaagctccaattctgggcagtcaccgcagaaaacgagccctcagctgggctgctgtctggctacccctttcagtgcttgggctttactcctgagcatcaacgggacttcattgcccgggatttggggccaacactggccaacagcacccaccacaatgtaagactcctcatgctggatgaccagaggctgctgctccctcattgggccaaggtggtgttgacagacccagaagctgccaaatatgttcatggcatcgctgtccactggtacctggattttttggcccctgcaaaggctactctgggagagacccacagactcttccccaataccatgctgtttgcatctgaagcctgcgtggggagcaaattctgggagcagtctgttaggctgggttcctgggatcggggcatgcaatattcccatagtataataactaacctcctctaccacgtggtaggatggacagactggaatctggctttgaacccagaaggaggccccaattgggtgcgcaactttgttgacagccccatcattgtggatatcacaaaggacaccttctacaaacagcctatgttctatcatctggggcactttagcaagttcattccagagggttcccagagagtaggcttggttgcctcacagaagaatgatctggatgctgtggcactcctgcatcctgacgggagtgcagtggtggtagtactgaacaggtctagcaaagatgttcccttgactatcaaagacccagctgtgggctttctggaaaccatttcccctggatactctatccacacctatctctggagaagacagtaatga

SEQ ID NO: 658 - protein, 536 aa, synthetic construct
  REGION 1..536: note = Variant of B-Glucocerebrosidase
MEFSSPSREECPKPLSRVSIMAGSLTGLLLLQAVSWASGARPCIPKSFGYSSVVCVCNATYCDSFDPPTLPALGTFHRYESTRSGRRMELSMGPIQANHTGTGLLLTLQPEQKFQKVKGFGGAMTDAAALNILALSPPAQNLLLKSYFSEEGIGYNIIRVPMASCDFSIRTYTYADTPDDFQLHNFSLPEEDTKLKIPLIHRALQLSQRPVSLFASPWTSPTWLKTNGAVNGKGSLKGQPGDIYHQTWARYFVKFLDAYAEHKLQFWAVTAENEPSAGLLSGYPFQCLGFTPEHQRDFIARDLGPTLANSTHHNVRLLMLDDQRLLLPHWAKVVLTDPEAAKYVHGIAVHWYLDFLAPAKATLGETHRLFPNTMLFASEACVGSKFWEQSVRLGSWDRGMQYSHSIITNLLYHVVGWTDWNLALNPEGGPNWVRNFVDSPIIVDITKDTFYKQPMFYHLGHFSKFIPEGSQRVGLVASQKNDLDAVALLHPDGSAVVVVLNRSSKDVPLTIKDPAVGFLETISPGYSIHTYLWRRQ

SEQ ID NO: 659 - DNA, 1614 bp, synthetic construct
  misc_feature 1..1614: note = Variant of B-Glucocerebrosidase
  source 1..1614: mol_type = other DNA
atggagttttcttctcctagtagagaagaatgccccaagccactgagcagggtgagcatcatggctggatccctcacagggctgcttcttttgcaggcagtctcatgggcctctggagccaggccctgtattcccaagtcattcggctactcctcagtggtgtgtgtatgcaatgccacctattgtgacagtttcgatcctccaactctccctgctctgggtaccttctcccggtatgagagcacaagaagtggaagacgcatggagctctcaatgggccctatacaggctaaccacactgggacaggtctgctgctgaccctccaacctgaacagaagtttcagaaagtcaagggatttggaggagccatgactgatgcagcagcactcaacatcttggccctgtctccaccagcccagaatctgctgttgaagtcctacttctcagaggaggggattggctacaacatcatccgggttcccatggctagctgtgacttctccattaggacctatacatacgctgacacccccgatgattttcagctccataatttcagtctccctgaagaagacaccaaactgaagatacctctgattcacagagccttgcaactgtcccaaaggccagtgagcctcttcgcttctccctggactagtcctacatggctgaagactaatggtgctgttaatgggaaaggctccctgaaaggacagccaggtgacatatatcatcagacatgggcccgctactttgtgaaattccttgatgcctatgcagagcacaagctccaattctgggcagtcaccgcagaaaacgagccctcagctgggctgctgtctggctacccctttcagtgcttgggctttactcctgagcatcaacgggacttcattgcccgggatttggggccaacactggccaacagcacccaccacaatgtaagactcctcatgctggatgaccagaggctgctgctccctcattgggccaaggtggtgttgacagacccagaagctgccaaatatgttcatggcatcgctgtccactggtacctggattttttggcccctgcaaaggctactctgggagagacccacagactcttccccaataccatgctgtttgcatcagaagcctgcgtggggagcaaattctgggagcagtctgttaggctgggttcctgggatcggggcatgcaatattcccatagtataataactaacctcctctaccacgtggtaggatggacagactggaatctggctttgaacccagaaggaggccccaattgggtgcgcaactttgttgacagccccatcattgtggatatcacaaaggacaccttctacaaacagcctatgttctatcatctggggcactttagcaagttcattccagagggttccgagagagtaggcttggttgcctcacagaagaatgatctggatgctgtggcactcctgcatcctgacgggagtgcagtggtggtagtactgaacaggtctagcaaagatgttcccttgactatcaaagacccagctgtgggctttctggaaaccatttcccctggatactctatccacacctatctctggagaagacagtaatga

SEQ ID NO: 660 - protein, 536 aa, synthetic construct
  REGION 1..536: note = Variant of B-Glucocerebrosidase
MEFSSPSREECPKPLSRVSIMAGSLTGLLLLQAVSWASGARPCIPKSFGYSSVVCVCNATYCDSFDPPTLPALGTFSRYESTRSGRRMELSMGPIQANHTGTGLLLTLQPEQKFQKVKGFGGAMTDAAALNILALSPPAQNLLLKSYFSEEGIGYNIIRVPMASCDFSIRTYTYADTPDDFQLHNFSLPEEDTKLKIPLIHRALQLSQRPVSLFASPWTSPTWLKTNGAVNGKGSLKGQPGDIYHQTWARYFVKFLDAYAEHKLQFWAVTAENEPSAGLLSGYPFQCLGFTPEHQRDFIARDLGPTLANSTHHNVRLLMLDDQRLLLPHWAKVVLTDPEAAKYVHGIAVHWYLDFLAPAKATLGETHRLFPNTMLFASEACVGSKFWEQSVRLGSWDRGMQYSHSIITNLLYHVVGWTDWNLALNPEGGPNWVRNFVDSPIIVDITKDTFYKQPMFYHLGHFSKFIPEGSERVGLVASQKNDLDAVALLHPDGSAVVVVLNRSSKDVPLTIKDPAVGFLETISPGYSIHTYLWRRQ

SEQ ID NO: 661 - DNA, 1614 bp, synthetic construct
  misc_feature 1..1614: note = Variant of B-Glucocerebrosidase
  source 1..1614: mol_type = other DNA
atggagttttcttctcctagtagagaagaatgccccaagccactgagcagggtgagcatcatggctggatccctcacagggctgcttcttttgcaggcagtctcatgggcctctggagccaggccctgtattcccaagtcattcggctactcctcagtggtgtgtgtatgcaatgccacctattgtgacagtttcgatcctccaactctccctgctctgggtaccttctcccggtatgagagcacaagaagtggaagacgcatggagctctcaatgggccctatacaggctaaccacactgggacaggtctgctgctgaccctccaacctgaacagaagtttcagaaagtcaagggatttggaggagccatgactgatgcagcagcactcaacatcttggccctgtctccaccagcccagaatctgctgttgaagtcctacttctcagaggaggggattggctacaacatcatccgggttcccatggctagctgtgacttctccattaggacctatacatacgctgacacccccgatgattttcagctccataatttcagtctccctgaagaagacaccaaactgaagatacctctgattcacagagccttgcaactgtcccaaaggccagtgagcctcttcgcttctccctggactagtcctacatggctgaagactaatggtgctgttaatgggaaaggctccctgaaaggacagccaggtgacatatatcatcagacatgggcccgctactttgtgaaattccttgatgcctatgcagagcacaagctccaattctgggcagtcaccgcagaaaacgagccctcagctgggctgctgtctggctacccctttcagtgcttgggctttactcctgagcatcaacgggacttcattgcccgggatttggggccaacactggccaacagcacccaccacaatgtaagactcctcatgctggatgaccagaggctgctgctccctcattgggccaaggtggtgttgacagacccagaagctgccaaatatgttcatggcatcgctgtccactggtacctggattttttggcccctgcaaaggctactctgggagagacccacagactcttccccaataccatgctgtttgcatcagaagcctgcgtggggagcaaattctgggagcagtctgttaggctgggttcctgggatcggggcatgcaatattcccatagtataataactaacctcctctaccacgtggtaggatggacagactggaatctggctttgaacccagaaggaggccccaattgggtgcgcaactttgttgacagccccatcattgtggatatcacaaaggacaccttctacaaacagcctatgttctatcatctggggcactttagcaagttcattccagagggttcccagagagtaggcttggttgcctcacagaagaatgatctggatgctgtggcactcctgcatcctgacgggagtgcagtggtggtagtactgaacaggtctagcaaagatgttcccttgactatcaaagacccagctttgggctttctggaaaccatttcccctggatactctatccacacctatctctggagaagacagtaatga

SEQ ID NO: 662 - protein, 536 aa, synthetic construct
  REGION 1..536: note = Variant of B-Glucocerebrosidase
MEFSSPSREECPKPLSRVSIMAGSLTGLLLLQAVSWASGARPCIPKSFGYSSVVCVCNATYCDSFDPPTLPALGTFSRYESTRSGRRMELSMGPIQANHTGTGLLLTLQPEQKFQKVKGFGGAMTDAAALNILALSPPAQNLLLKSYFSEEGIGYNIIRVPMASCDFSIRTYTYADTPDDFQLHNFSLPEEDTKLKIPLIHRALQLSQRPVSLFASPWTSPTWLKTNGAVNGKGSLKGQPGDIYHQTWARYFVKFLDAYAEHKLQFWAVTAENEPSAGLLSGYPFQCLGFTPEHQRDFIARDLGPTLANSTHHNVRLLMLDDQRLLLPHWAKVVLTDPEAAKYVHGIAVHWYLDFLAPAKATLGETHRLFPNTMLFASEACVGSKFWEQSVRLGSWDRGMQYSHSIITNLLYHVVGWTDWNLALNPEGGPNWVRNFVDSPIIVDITKDTFYKQPMFYHLGHFSKFIPEGSQRVGLVASQKNDLDAVALLHPDGSAVVVVLNRSSKDVPLTIKDPALGFLETISPGYSIHTYLWRRQ

SEQ ID NO: 663 - DNA, 1614 bp, synthetic construct
  misc_feature 1..1614: note = Variant of B-Glucocerebrosidase
  source 1..1614: mol_type = other DNA
atggagttttcttctcctagtagagaagaatgccccaagccactgagcagggtgagcatcatggctggatccctcacagggctgcttcttttgcaggcagtctcatgggcctctggagccaggccctgtattcccaagtcattcggctactcctcagtggtgtgtgtatgcaatgccacctattgtgacagtttcgatcctccaactctccctgctctgggtaccttctcccggtatgagagcacaagaagtggaagacgcatggagctctcaatgggccctatacaggctaaccacactgggacaggtctgctgctgaccctccaacctgaacagaagtttcagaaagtcaagggatttggaggagccatgactgatgcagcagcactcaacatcttggccctgtctccaccagcccagaatctgctgttgaagtcctacttctcagaggaggggattggctacaacatcatccgggttcccatggctagctgtgacttctccattaggacctatacatacgctgacacccccgatgattttcagctccataatttcagtctccctgaagaagacaccaaactgaagatacctctgattcacagagccttgcaactgtcccaaaggccagtgagcctcttcgcttctccctggactagtcctacatggctgaagactaatggtgctgttaatgggaaaggctccctgaaaggacagccaggtgacatatatcatcagacatgggcccgctactttgtgaaattccttgatgcctatgcagagcacaagctccaattctgggcagtcaccgcagaaaacgagccctcagctgggctgctgtctggctacccctttcagtgcttgggctttactcctgagcatcaacgggacttcattgcccgggatttggggccaacactggccaacagcacccaccacaatgtaagactcctcatgctggatgaccagaggctgctgctccctcattgggccaaggtggtgttgacagacccagaagctgccaaatatgttcatggcatcgctgtccactggtacctggattttttggcccctgcaaaggctactctgggagagacccacagactcttccccaataccatgctgtttgcatcagaagcctgcgtggggagcaaattctgggagcagtctgttaggctgggttcctgggatcggggcatgcaatattcccatagtataataactaacctcctctaccacgtggtaggatggacagactggaatctggctttgaacccagaaggaggccccaattgggtgcgcaactttgttgacagccccatcattgtggatatcacaaaggacaccttctacaaacagcctatgttctatcatctggggcactttagcaagttcattcgtgagggttcccagagagtaggcttggttgcctcacagaagaatgatctggatgctgtggcactcctgcatcctgacgggagtgcagtggtggtagtactgaacaggtctagcaaagatgttcccttgactatcaaagacccagctgtgggctttctggaaaccatttcccctggatactctatccacacctatctctggagaagacagtaatga

SEQ ID NO: 664 - protein, 536 aa, synthetic construct
  REGION 1..536: note = Variant of B-Glucocerebrosidase
MEFSSPSREECPKPLSRVSIMAGSLTGLLLLQAVSWASGARPCIPKSFGYSSVVCVCNATYCDSFDPPTLPALGTFSRYESTRSGRRMELSMGPIQANHTGTGLLLTLQPEQKFQKVKGFGGAMTDAAALNILALSPPAQNLLLKSYFSEEGIGYNIIRVPMASCDFSIRTYTYADTPDDFQLHNFSLPEEDTKLKIPLIHRALQLSQRPVSLFASPWTSPTWLKTNGAVNGKGSLKGQPGDIYHQTWARYFVKFLDAYAEHKLQFWAVTAENEPSAGLLSGYPFQCLGFTPEHQRDFIARDLGPTLANSTHHNVRLLMLDDQRLLLPHWAKVVLTDPEAAKYVHGIAVHWYLDFLAPAKATLGETHRLFPNTMLFASEACVGSKFWEQSVRLGSWDRGMQYSHSIITNLLYHVVGWTDWNLALNPEGGPNWVRNFVDSPIIVDITKDTFYKQPMFYHLGHFSKFIREGSQRVGLVASQKNDLDAVALLHPDGSAVVVVLNRSSKDVPLTIKDPAVGFLETISPGYSIHTYLWRRQ

SEQ ID NO: 665 - DNA, 1614 bp, synthetic construct
  misc_feature 1..1614: note = Variant of B-Glucocerebrosidase
  source 1..1614: mol_type = other DNA
atggagttttcttctcctagtagagaagaatgccccaagccactgagcagggtgagcatcatggctggatccctcacagggctgcttcttttgcaggcagtctcatgggcctctggagccaggccctgtattcccaagtcattcggctactcctcagtggtgtgtgtatgcaatgccacctattgtgacagtttcgatcctccaactctccctgctctgggtaccttctcccggtatgagagcacaagaagtggaagacgcatggagctctcaatgggccctatacaggctaaccacactgggacaggtctgctgctgaccctccaacctgaacagaagtttcagaaagtcaagggatttggaggagccatgactgatgcagcagcactcaacatcttggccctgtctccaccagcccagaatctgctgttgaagtcctacttctcagaggaggggattggctacaacatcatccgggttcccatggctagctgtgacttctccattaggacctatacatacgctgacacccccgatgattttcagctccataatttcagtctccctgaagaagacaccaaactgaagatacctctgattcacagagccttgcaactgtcccaaaggccagtgagcctcttcgcttctccctggactagtcctacatggctgaagactaatggtgctgttaatgggaggggctccctgaaaggacagccaggtgacatatatcatcagacatgggcccgctactttgtgaaattccttgatgcctatgcagagcacaagctccaattctgggcagtcaccgcagaaaacgagccctcagctgggctgctgtctggctacccctttcagtgcttgggctttactcctgagcatcaacgggacttcattgcccgggatttggggccaacactggccaacagcacccaccacaatgtaagactcctcatgctggatgaccagaggctgctgctccctcattgggccaaggtggtgttgacagacccagaagctgccaaatatgttcatggcatcgctgtccactggtacctggattttttggcccctgcaaaggctactctgggagagacccacagactcttccccaataccatgctgtttgcatcagaagcctgcgtggggagcaaattctgggagcagtctgttaggctgggttcctgggatcggggcatgcaatattcccatagtataataactaacctcctctaccacgtggtaggatggacagactggaatctggctttgaacccagaaggaggccccaattgggtgcgcaactttgttgacagccccatcattgtggatatcacaaaggacaccttctacaaacagcctatgttctatcatctggggcactttagcaagttcattccagagggttcccagagagtaggcttggttgcctcacagaagaatgatctggatgctgtggcactcctgcatcctgacgggagtgcagtggtggtagtactgaacaggtctagcaaagatgttcccttgactatcaaagacccagctgtgggctttctggaaaccatttcccctggatactctatccacacctatctctggagaagacagtaatga

SEQ ID NO: 666 - protein, 536 aa, synthetic construct
  REGION 1..536: note = Variant of B-Glucocerebrosidase
MEFSSPSREECPKPLSRVSIMAGSLTGLLLLQAVSWASGARPCIPKSFGYSSVVCVCNATYCDSFDPPTLPALGTFSRYESTRSGRRMELSMGPIQANHTGTGLLLTLQPEQKFQKVKGFGGAMTDAAALNILALSPPAQNLLLKSYFSEEGIGYNIIRVPMASCDFSIRTYTYADTPDDFQLHNFSLPEEDTKLKIPLIHRALQLSQRPVSLFASPWTSPTWLKTNGAVNGRGSLKGQPGDIYHQTWARYFVKFLDAYAEHKLQFWAVTAENEPSAGLLSGYPFQCLGFTPEHQRDFIARDLGPTLANSTHHNVRLLMLDDQRLLLPHWAKVVLTDPEAAKYVHGIAVHWYLDFLAPAKATLGETHRLFPNTMLFASEACVGSKFWEQSVRLGSWDRGMQYSHSIITNLLYHVVGWTDWNLALNPEGGPNWVRNFVDSPIIVDITKDTFYKQPMFYHLGHFSKFIPEGSQRVGLVASQKNDLDAVALLHPDGSAVVVVLNRSSKDVPLTIKDPAVGFLETISPGYSIHTYLWRRQ

SEQ ID NO: 667 - DNA, 1614 bp, synthetic construct
  misc_feature 1..1614: note = Variant of B-Glucocerebrosidase
  source 1..1614: mol_type = other DNA
atggagttttcttctcctagtagagaagaatgccccaagccactgagcagggtgagcatcatggctggatccctcacagggctgcttcttttgcaggcagtctcatgggcctctggagccaggccctgtattcccaagtcattcggctactcctcagtggtgtgtgtatgcaatgccacctattgtgacagtttcgatcctccaactctccctgctctgggtaccttctcccggtatgagagcacaagaagtggaagacgcatggagctcactatgggcccaatacaggctaaccacactgggacaggtctgctgctgaccctccaacctgaacagaagtttcagaaagtcaagggatttggaggagccatgactgatgcagcagcactcaacatcttggccctgtctccaccagcccagaatctgctgttgaagtcctacttctcagaggaggggattggctacaacatcatccgggttcccatggctagctgtgacttctccattaggacctatacatacgctgacacccccgatgattttcagctccataatttcagtctccctgaagaagacaccaaactgaagatacctctgattcacagagccttgcaactgtcccaaaggccagtgagcctcttcgcttctccctggactagtcctacatggctgaagactaatggtgctgttaatgggaaaggctccctgaaaggacagccaggtgacatatatcatcagacatgggcccgctactttgtgaaattccttgatgcctatgcagagcacaagctccaattctgggcagtcaccgcagaaaacgagccctcagctgggctgctgtctggctacccctttcagtgcttgggctttactcctgagcatcaacgggacttcattgcccgggatttggggccaacactggccaacagcacccaccacaatgtaagactcctcatgctggatgaccagaggctgctgctccctcattgggccaaggtggtgttgacagacccagaagctgccaaatatgttcatggcatcgctgtccactggtacctggattttttggcccctgcaaaggctactctgggagagacccacagactcttccccaataccatgctgtttgcatcagaagcctgcgtggggagcaaattctgggagcagtctgttaggctgggttcctgggatcggggcatgcaatattcccatagtataataactaacctcctctaccacgtggtaggatggacagactggaatctggctttgaacccagaaggaggccccaattgggtgcgcaactttgttgacagccccatcattgtggatatcacaaaggacaccttctacaaacagcctatgttctatcatctggggcactttagcaagttcattccagagggttcccagagagtaggcttggttgcctcacagaagaatgatctggatgctgtggcactcctgcatcctgacgggagtgcagtggtggtagtactgaacaggtctagcaaagatgttcccttgactatcaaagacccagctgtgggctttctggaaaccatttcccctggatactctatccacacctatctctggagaagacagtaatga

SEQ ID NO: 668 - protein, 536 aa, synthetic construct
  REGION 1..536: note = Variant of B-Glucocerebrosidase
MEFSSPSREECPKPLSRVSIMAGSLTGLLLLQAVSWASGARPCIPKSFGYSSVVCVCNATYCDSFDPPTLPALGTFSRYESTRSGRRMELTMGPIQANHTGTGLLLTLQPEQKFQKVKGFGGAMTDAAALNILALSPPAQNLLLKSYFSEEGIGYNIIRVPMASCDFSIRTYTYADTPDDFQLHNFSLPEEDTKLKIPLIHRALQLSQRPVSLFASPWTSPTWLKTNGAVNGKGSLKGQPGDIYHQTWARYFVKFLDAYAEHKLQFWAVTAENEPSAGLLSGYPFQCLGFTPEHQRDFIARDLGPTLANSTHHNVRLLMLDDQRLLLPHWAKVVLTDPEAAKYVHGIAVHWYLDFLAPAKATLGETHRLFPNTMLFASEACVGSKFWEQSVRLGSWDRGMQYSHSIITNLLYHVVGWTDWNLALNPEGGPNWVRNFVDSPIIVDITKDTFYKQPMFYHLGHFSKFIPEGSQRVGLVASQKNDLDAVALLHPDGSAVVVVLNRSSKDVPLTIKDPAVGFLETISPGYSIHTYLWRRQ

SEQ ID NO: 669 - DNA, 1614 bp, synthetic construct
  misc_feature 1..1614: note = Variant of B-Glucocerebrosidase
  source 1..1614: mol_type = other DNA
atggagttttcttctcctagtagagaagaatgccccaagccactgagcagggtgagcatcatggctggatccctcacagggctgcttcttttgcaggcagtctcatgggcctctggagccaggccctgtattcccaagtcattcggctactcctcagtggtgtgtgtatgcaatgccacctattgtgacagtttcgatcctccaactctccctgctctgggtaccttctcccggtatgagagcacaagaagtggaagacgcatggagctctcaatgggccctatacaggctaaccacactgggacaggtctgctgctgaccctccaacctgaacagaagtttcagaaagtcaagggatttggaggagccatgactgatgcagcagcactcaacatcttggccctgtctccaccagcccagaatctgctgttgaagtcctacttctcagaggaggggattggctacaacatcatccgggttcccatggctagctgtgacttctccattaggacctatacatacgctgacacccccgatgattttcagctccataatttcagtctccctgaagaagacaccctgctgaagatacctctgattcacagagccttgcaactgtcccaaaggccagtgagcctcttcgcttctccctggactagtcctacatggctgaagactaatggtgctgttaatgggaaaggctccctgaaaggacagccaggtgacatatatcatcagacatgggcccgctactttgtgaaattccttgatgcctatgcagagcacaagctccaattctgggcagtcaccgcagaaaacgagccctcagctgggctgctgtctggctacccctttcagtgcttgggctttactcctgagcatcaacgggacttcattgcccgggatttggggccaacactggccaacagcacccaccacaatgtaagactcctcatgctggatgaccagaggctgctgctccctcattgggccaaggtggtgttgacagacccagaagctgccaaatatgttcatggcatcgctgtccactggtacctggattttttggcccctgcaaaggctactctgggagagacccacagactcttccccaataccatgctgtttgcatcagaagcctgcgtggggagcaaattctgggagcagtctgttaggctgggttcctgggatcggggcatgcaatattcccatagtataataactaacctcctctaccacgtggtaggatggacagactggaatctggctttgaacccagaaggaggccccaattgggtgcgcaactttgttgacagccccatcattgtggatatcacaaaggacaccttctacaaacagcctatgttctatcatctggggcactttagcaagttcattccagagggttcccagagagtaggcttggttgcctcacagaagaatgatctggatgctgtggcactcctgcatcctgacgggagtgcagtggtggtagtactgaacaggtctagcaaagatgttcccttgactatcaaagacccagctgtgggctttctggaaaccatttcccctggatactctatccacacctatctctggagaagacagtaatga

SEQ ID NO: 670 - protein, 536 aa, synthetic construct
  REGION 1..536: note = Variant of B-Glucocerebrosidase
MEFSSPSREECPKPLSRVSIMAGSLTGLLLLQAVSWASGARPCIPKSFGYSSVVCVCNATYCDSFDPPTLPALGTFSRYESTRSGRRMELSMGPIQANHTGTGLLLTLQPEQKFQKVKGFGGAMTDAAALNILALSPPAQNLLLKSYFSEEGIGYNIIRVPMASCDFSIRTYTYADTPDDFQLHNFSLPEEDTLLKIPLIHRALQLSQRPVSLFASPWTSPTWLKTNGAVNGKGSLKGQPGDIYHQTWARYFVKFLDAYAEHKLQFWAVTAENEPSAGLLSGYPFQCLGFTPEHQRDFIARDLGPTLANSTHHNVRLLMLDDQRLLLPHWAKVVLTDPEAAKYVHGIAVHWYLDFLAPAKATLGETHRLFPNTMLFASEACVGSKFWEQSVRLGSWDRGMQYSHSIITNLLYHVVGWTDWNLALNPEGGPNWVRNFVDSPIIVDITKDTFYKQPMFYHLGHFSKFIPEGSQRVGLVASQKNDLDAVALLHPDGSAVVVVLNRSSKDVPLTIKDPAVGFLETISPGYSIHTYLWRRQ

SEQ ID NO: 671 - DNA, 1614 bp, synthetic construct
  misc_feature 1..1614: note = Variant of B-Glucocerebrosidase
  source 1..1614: mol_type = other DNA
atggagttttcttctcctagtagagaagaatgccccaagccactgagcagggtgagcatcatggctggatccctcacagggctgcttcttttgcaggcagtctcatgggcctctggagccaggccctgtattcccaagtcattcggctactcctcagtggtgtgtgtatgcaatgccacctattgtgacagtttcgatcctccaactctccctgctctgggtaccttctcccggtatgagagcacaagaggtggaagacgcatggagctctcaatgggccctatacaggctaaccacactgggacaggtctgctgctgaccctccaacctgaacagaagtttcagaaagtcaagggatttggaggagccatgactgatgcagcagcactcaacatcttggccctgtctccaccagcccagaatctgctgttgaagtcctacttctcagaggaggggattggctacaacatcatccgggttcccatggctagctgtgacttctccattaggacctatacatacgctgacacccccgatgattttcagctccataatttcagtctccctgaagaagacaccaaactgaagatacctctgattcacagagccttgcaactgtcccaaaggccagtgagcctcttcgcttctccctggactagtcctacatggctgaagactaatggtgctgttaatgggaaaggctccctgaaaggacagccaggtgacatatatcatcagacatgggcccgctactttgtgaaattccttgatgcctatgcagagcacaagctccaattctgggcagtcaccgcagaaaacgagccctcagctgggctgctgtctggctacccctttcagtgcttgggctttactcctgagcatcaacgggacttcattgcccgggatttggggccaacactggccaacagcacccaccacaatgtaagactcctcatgctggatgaccagaggctgctgctccctcattgggccaaggtggtgttgacagacccagaagctgccaaatatgttcatggcatcgctgtccactggtacctggattttttggcccctgcaaaggctactctgggagagacccacagactcttccccaataccatgctgtttgcatcagaagcctgcgtggggagcaaattctgggagcagtctgttaggctgggttcctgggatcggggcatgcaatattcccatagtataataactaacctcctctaccacgtggtaggatggacagactggaatctggctttgaacccagaaggaggccccaattgggtgcgcaactttgttgacagccccatcattgtggatatcacaaaggacaccttctacaaacagcctatgttctatcatctggggcactttagcaagttcattccagagggttcccagagagtaggcttggttgcctcacagaagaatgatctggatgctgtggcactcctgcatcctgacgggagtgcagtggtggtagtactgaacaggtctagcaaagatgttcccttgactatcaaagacccagctgtgggctttctggaaaccatttcccctggatactctatccacacctatctctggagaagacagtaatga

SEQ ID NO: 672 - protein, 536 aa, synthetic construct
  REGION 1..536: note = Variant of B-Glucocerebrosidase
MEFSSPSREECPKPLSRVSIMAGSLTGLLLLQAVSWASGARPCIPKSFGYSSVVCVCNATYCDSFDPPTLPALGTFSRYESTRGGRRMELSMGPIQANHTGTGLLLTLQPEQKFQKVKGFGGAMTDAAALNILALSPPAQNLLLKSYFSEEGIGYNIIRVPMASCDFSIRTYTYADTPDDFQLHNFSLPEEDTKLKIPLIHRALQLSQRPVSLFASPWTSPTWLKTNGAVNGKGSLKGQPGDIYHQTWARYFVKFLDAYAEHKLQFWAVTAENEPSAGLLSGYPFQCLGFTPEHQRDFIARDLGPTLANSTHHNVRLLMLDDQRLLLPHWAKVVLTDPEAAKYVHGIAVHWYLDFLAPAKATLGETHRLFPNTMLFASEACVGSKFWEQSVRLGSWDRGMQYSHSIITNLLYHVVGWTDWNLALNPEGGPNWVRNFVDSPIIVDITKDTFYKQPMFYHLGHFSKFIPEGSQRVGLVASQKNDLDAVALLHPDGSAVVVVLNRSSKDVPLTIKDPAVGFLETISPGYSIHTYLWRRQ

SEQ ID NO: 673 - DNA, 1614 bp, synthetic construct
  misc_feature 1..1614: note = Variant of B-Glucocerebrosidase
  source 1..1614: mol_type = other DNA
atggagttttcttctcctagtagagaagaatgccccaagccactgagcagggtgagcatcatggctggatccctcacagggctgcttcttttgcaggcagtctcatgggcctctggagccaggccctgtattcccaagtcattcggctactcctcagtggtgtgtgtatgcaatgccacctattgtgacagtttcgatcctccaactctccctgctctgggtaccttctcccggtatgagagcacaagaagtggaagacgcatggagctctcaatgggccctatacaggctaaccacactgggacaggtctgctgctgaccctccaacctgaacagaagtttcagaaagtcaagggatttggaggagccatgactgatgcagcagcactcaacatcttggccctgtctccaccagcccagaatctgctgttgaagtcctacttctcagaggaggggattggctacaacatcatccgggttcccatggctagctgtgacttctccattaggacctatacatacgctgacacccccgatgattttcagctccataatttcagtctccctgaagaagacaccaaactgaagatacctctgattcacagagccttgcaactgtcccaaaggccagtgagcctcttcgcttctccctggactagtcctacatggctgaagactaatggtgctgttaatgggaaaggctccctgaaaggacagccaggtgacatatatcatcagacatgggcccgctactttgtgaaattccttgatgcctatgcagagcacaagctccaattctgggcagtcaccgcagaaaacgagccctcagctgggctgctgtctggctacccctttcagtgcttgggctttactcctgagcatcaacgggacttcattgcccgggatttggggccaacactggccaacagcacccaccacaatgtaagactcctcatgctggatgaccagaggctgctgctccctcattgggccaaggtggtgttgacagacccagaagctgccaaatatgttcatggcatcgctgtccactggtacctggattttttggcccctgcaaaggttactctgggagagacccacagactcttccccaataccatgctgtttgcatcagaagcctgcgtggggagcaaattctgggagcagtctgttaggctgggttcctgggatcggggcatgcaatattcccatagtataataactaacctcctctaccacgtggtaggatggacagactggaatctggctttgaacccagaaggaggccccaattgggtgcgcaactttgttgacagccccatcattgtggatatcacaaaggacaccttctacaaacagcctatgttctatcatctggggcactttagcaagttcattccagagggttcccagagagtaggcttggttgcctcacagaagaatgatctggatgctgtggcactcctgcatcctgacgggagtgcagtggtggtagtactgaacaggtctagcaaagatgttcccttgactatcaaagacccagctgtgggctttctggaaaccatttcccctggatactctatccacacctatctctggagaagacagtaatga

SEQ ID NO: 674 - protein, 536 aa, synthetic construct
  REGION 1..536: note = Variant of B-Glucocerebrosidase
MEFSSPSREECPKPLSRVSIMAGSLTGLLLLQAVSWASGARPCIPKSFGYSSVVCVCNATYCDSFDPPTLPALGTFSRYESTRSGRRMELSMGPIQANHTGTGLLLTLQPEQKFQKVKGFGGAMTDAAALNILALSPPAQNLLLKSYFSEEGIGYNIIRVPMASCDFSIRTYTYADTPDDFQLHNFSLPEEDTKLKIPLIHRALQLSQRPVSLFASPWTSPTWLKTNGAVNGKGSLKGQPGDIYHQTWARYFVKFLDAYAEHKLQFWAVTAENEPSAGLLSGYPFQCLGFTPEHQRDFIARDLGPTLANSTHHNVRLLMLDDQRLLLPHWAKVVLTDPEAAKYVHGIAVHWYLDFLAPAKVTLGETHRLFPNTMLFASEACVGSKFWEQSVRLGSWDRGMQYSHSIITNLLYHVVGWTDWNLALNPEGGPNWVRNFVDSPIIVDITKDTFYKQPMFYHLGHFSKFIPEGSQRVGLVASQKNDLDAVALLHPDGSAVVVVLNRSSKDVPLTIKDPAVGFLETISPGYSIHTYLWRRQ

SEQ ID NO: 675 - DNA, 1614 bp, synthetic construct
  misc_feature 1..1614: note = Variant of B-Glucocerebrosidase
  source 1..1614: mol_type = other DNA
atggagttttcttctcctagtagagaagaatgccccaagccactgagcagggtgagcatcatggctggatccctcacagggctgcttcttttgcaggcagtctcatgggcctctggagccaggccctgtattcccaagtcattcggctactcctcagtggtgtgtgtatgcaatgccacctattgtgacagtttcgatcctccaactctccctgctctgggtaccttctcccggtatgagagcacaagaagtggaagacgcatggagctctcaatgggccctatacaggctaaccacactgggacaggtctgctgctgaccctccaacctgaacagaagtttcagaaagtcaagggatttggaggagccatgactgatgcagcagcactcaacatcttggccctgtctccaccagcccagaatctgctgttgaagtcctacttctcagaggaggggattggctacaacatcatccgggttcccatggctagctgtgacttctccattaggacctatacatacgctgacacccccgatgattttcagctccataatttcagtctccctgaagaagacaccaaactgaagatacctctgattcacagagccttgcaactgtcccaaaggccagtgagcctcttcgcttctccctggactagtcctacatggctgaagactaatggtgctgttaatggggcgggctccctgaaaggacagccaggtgacatatatcatcagacatgggcccgctactttgtgaaattccttgatgcctatgcagagcacaagctccaattctgggcagtcaccgcagaaaacgagccctcagctgggctgctgtctggctacccctttcagtgcttgggctttactcctgagcatcaacgggacttcattgcccgggatttggggccaacactggccaacagcacccaccacaatgtaagactcctcatgctggatgaccagaggctgctgctccctcattgggccaaggtggtgttgacagacccagaagctgccaaatatgttcatggcatcgctgtccactggtacctggattttttggcccctgcaaaggctactctgggagagacccacagactcttccccaataccatgctgtttgcatcagaagcctgcgtggggagcaaattctgggagcagtctgttaggctgggttcctgggatcggggcatgcaatattcccatagtataataactaacctcctctaccacgtggtaggatggacagactggaatctggctttgaacccagaaggaggccccaattgggtgcgcaactttgttgacagccccatcattgtggatatcacaaaggacaccttctacaaacagcctatgttctatcatctggggcactttagcaagttcattccagagggttcccagagagtaggcttggttgcctcacagaagaatgatctggatgctgtggcactcctgcatcctgacgggagtgcagtggtggtagtactgaacaggtctagcaaagatgttcccttgactatcaaagacccagctgtgggctttctggaaaccatttcccctggatactctatccacacctatctctggagaagacagtaatga

SEQ ID NO: 676 - protein, 536 aa, synthetic construct
  REGION 1..536: note = Variant of B-Glucocerebrosidase
MEFSSPSREECPKPLSRVSIMAGSLTGLLLLQAVSWASGARPCIPKSFGYSSVVCVCNATYCDSFDPPTLPALGTFSRYESTRSGRRMELSMGPIQANHTGTGLLLTLQPEQKFQKVKGFGGAMTDAAALNILALSPPAQNLLLKSYFSEEGIGYNIIRVPMASCDFSIRTYTYADTPDDFQLHNFSLPEEDTKLKIPLIHRALQLSQRPVSLFASPWTSPTWLKTNGAVNGAGSLKGQPGDIYHQTWARYFVKFLDAYAEHKLQFWAVTAENEPSAGLLSGYPFQCLGFTPEHQRDFIARDLGPTLANSTHHNVRLLMLDDQRLLLPHWAKVVLTDPEAAKYVHGIAVHWYLDFLAPAKATLGETHRLFPNTMLFASEACVGSKFWEQSVRLGSWDRGMQYSHSIITNLLYHVVGWTDWNLALNPEGGPNWVRNFVDSPIIVDITKDTFYKQPMFYHLGHFSKFIPEGSQRVGLVASQKNDLDAVALLHPDGSAVVVVLNRSSKDVPLTIKDPAVGFLETISPGYSIHTYLWRRQ

SEQ ID NO: 677 - DNA, 1614 bp, synthetic construct
  misc_feature 1..1614: note = Variant of B-Glucocerebrosidase
  source 1..1614: mol_type = other DNA
atggagttttcttctcctagtagagaagaatgccccaagccactgagcagggtgagcatcatggctggatccctcacagggctgcttcttttgcaggcagtctcatgggcctctggagccaggccctgtattcccaagtcattcggctactcctcagtggtgtgtgtatgcaatgccacctattgtgacagtttcgatcctccaactctccctgctctgggtaccttctcccggtatgagagcacaagaagtggaagacgcatggagctctcaatgggccctatacaggctaaccacactgggacaggtctgctgctgaccctccaacctgaacagaagtttcagaaagtcaagggatttggaggagccatgactgatgcagcagcactcaacatcttggccctgtctccaccagcccagaatctgctgttgaagtcctacttctcagaggaggggattggctacaacatcatccgggttcccatggctagctgtgacttctccattagggtgtatacatacgctgacacccccgatgattttcagctccataatttcagtctccctgaagaagacaccaaactgaagatacctctgattcacagagccttgcaactgtcccaaaggccagtgagcctcttcgcttctccctggactagtcctacatggctgaagactaatggtgctgttaatgggaaaggctccctgaaaggacagccaggtgacatatatcatcagacatgggcccgctactttgtgaaattccttgatgcctatgcagagcacaagctccaattctgggcagtcaccgcagaaaacgagccctcagctgggctgctgtctggctacccctttcagtgcttgggctttactcctgagcatcaacgggacttcattgcccgggatttggggccaacactggccaacagcacccaccacaatgtaagactcctcatgctggatgaccagaggctgctgctccctcattgggccaaggtggtgttgacagacccagaagctgccaaatatgttcatggcatcgctgtccactggtacctggattttttggcccctgcaaaggctactctgggagagacccacagactcttccccaataccatgctgtttgcatcagaagcctgcgtggggagcaaattctgggagcagtctgttaggctgggttcctgggatcggggcatgcaatattcccatagtataataactaacctcctctaccacgtggtaggatggacagactggaatctggctttgaacccagaaggaggccccaattgggtgcgcaactttgttgacagccccatcattgtggatatcacaaaggacaccttctacaaacagcctatgttctatcatctggggcactttagcaagttcattccagagggttcccagagagtaggcttggttgcctcacagaagaatgatctggatgctgtggcactcctgcatcctgacgggagtgcagtggtggtagtactgaacaggtctagcaaagatgttcccttgactatcaaagacccagctgtgggctttctggaaaccatttcccctggatactctatccacacctatctctggagaagacagtaatga

SEQ ID NO: 678 - protein, 536 aa, synthetic construct
  REGION 1..536: note = Variant of B-Glucocerebrosidase
MEFSSPSREECPKPLSRVSIMAGSLTGLLLLQAVSWASGARPCIPKSFGYSSVVCVCNATYCDSFDPPTLPALGTFSRYESTRSGRRMELSMGPIQANHTGTGLLLTLQPEQKFQKVKGFGGAMTDAAALNILALSPPAQNLLLKSYFSEEGIGYNIIRVPMASCDFSIRVYTYADTPDDFQLHNFSLPEEDTKLKIPLIHRALQLSQRPVSLFASPWTSPTWLKTNGAVNGKGSLKGQPGDIYHQTWARYFVKFLDAYAEHKLQFWAVTAENEPSAGLLSGYPFQCLGFTPEHQRDFIARDLGPTLANSTHHNVRLLMLDDQRLLLPHWAKVVLTDPEAAKYVHGIAVHWYLDFLAPAKATLGETHRLFPNTMLFASEACVGSKFWEQSVRLGSWDRGMQYSHSIITNLLYHVVGWTDWNLALNPEGGPNWVRNFVDSPIIVDITKDTFYKQPMFYHLGHFSKFIPEGSQRVGLVASQKNDLDAVALLHPDGSAVVVVLNRSSKDVPLTIKDPAVGFLETISPGYSIHTYLWRRQ

SEQ ID NO: 679 - DNA, 1614 bp, synthetic construct
  misc_feature 1..1614: note = Variant of B-Glucocerebrosidase
  source 1..1614: mol_type = other DNA
atggagttttcttctcctagtagagaagaatgccccaagccactgagcagggtgagcatcatggctggatccctcacagggctgcttcttttgcaggcagtctcatgggcctctggagccaggccctgtattcccaagtcattcggctactcctcagtggtgtgtgtatgcaatgccacctattgtgacagtttcgatcctccaactctccctgctctgggtaccttctcccggtatgagagcacaagaagtggaagacgcatggagctctcaatgggccctatacaggctaaccacactgggacaggtctgctgctgaccctccaacctgaacagaagtttcagaaagtcaagggatttggaggagccatgactgatgcagcagcactcaacatcttggccctgtctccaccagcccagaatctgctgttgaagtcctacttctcagaggaggggattggctacaacatcatccgggttcccatggctagctgtgacttctccattaggacctatacatacgctgacacccccgatgattttcagctccataatttcagtctccctgaagaagacaccaaactgaagatacctctgattcacagagccttgcaactgtcccaaaggccagtgagcctcttcgcttctccctggactagtcctacatggctgaagactaatggtgctgttaatgggaaaggctccctgaaaggacagccaggtgacatatatcatcagacatgggcccgctactttgtgaaattccttgatgcctatgcagagcacaagctccaattctgggcagtcaccgcagaaaacgagccctcagctgggctgctgtctggctacccctttcagtgcttgggctttactcctgagcatcaacgggacttcattgcccgggatttggggccaacactggccaacagcacccaccacaatgtaagactcctcatgctggatgaccagaggctgctgctccctcattgggccaaggtggtgttgacagacccagaagctgccaaatatgttcatggcatcgctgtccactggtacctggattttttggcccctgcaaaggctactctgggagagacccacagactcttccccaataccatgctgtttgcatcagaagcctgcgtggggagcaaattctgggagcagtctgttaggctgggttcctgggatcggggcatgcaatattcccatagtataataactaacctcctctaccacgtggtaggatggacagactggaatctggctttgaacccagaaggaggccccaattgggtgcgcaactttgttgacagccccatcattgtggatatcacaaaggacaccttctacaaacagcctatgttctatcatctggggcactttagcaagttcattccagagggttcccagagagtaggcttggttgcctcacagaagaatgatctggatgctgtggcactcctgcatcctgacgggagtgcagtggtggtagtactgaacaggtctagcaaagatgttcccttgactatcaaagacccagctgtgggctttctggaaaccatttcccctggatactctatccacacctatctctggagaagactgtaatga

SEQ ID NO: 680 - protein, 536 aa, synthetic construct
  REGION 1..536: note = Variant of B-Glucocerebrosidase
MEFSSPSREECPKPLSRVSIMAGSLTGLLLLQAVSWASGARPCIPKSFGYSSVVCVCNATYCDSFDPPTLPALGTFSRYESTRSGRRMELSMGPIQANHTGTGLLLTLQPEQKFQKVKGFGGAMTDAAALNILALSPPAQNLLLKSYFSEEGIGYNIIRVPMASCDFSIRTYTYADTPDDFQLHNFSLPEEDTKLKIPLIHRALQLSQRPVSLFASPWTSPTWLKTNGAVNGKGSLKGQPGDIYHQTWARYFVKFLDAYAEHKLQFWAVTAENEPSAGLLSGYPFQCLGFTPEHQRDFIARDLGPTLANSTHHNVRLLMLDDQRLLLPHWAKVVLTDPEAAKYVHGIAVHWYLDFLAPAKATLGETHRLFPNTMLFASEACVGSKFWEQSVRLGSWDRGMQYSHSIITNLLYHVVGWTDWNLALNPEGGPNWVRNFVDSPIIVDITKDTFYKQPMFYHLGHFSKFIPEGSQRVGLVASQKNDLDAVALLHPDGSAVVVVLNRSSKDVPLTIKDPAVGFLETISPGYSIHTYLWRRL

SEQ ID NO: 681 - DNA, 1614 bp, synthetic construct
  misc_feature 1..1614: note = Variant of B-Glucocerebrosidase
  source 1..1614: mol_type = other DNA
atggagttttcttctcctagtagagaagaatgccccaagccactgagcagggtgagcatcatggctggatccctcacagggctgcttcttttgcaggcagtctcatgggcctctggagccaggccctgtattcccaagtcattcggcgcttcctcagtggtgtgtgtatgcaatgccacctattgtgacagtttcgatcctccaactctccctgctctgggtaccttctcccggtatgagagcacaagaagtggaagacgcatggagctctcaatgggccctatacaggctaaccacactgggacaggtctgctgctgaccctccaacctgaacagaagtttcagaaagtcaagggatttggaggagccatgactgatgcagcagcactcaacatcttggccctgtctccaccagcccagaatctgctgttgaagtcctacttctcagaggaggggattggctacaacatcatccgggttcccatggctagctgtgacttctccattaggacctatacatacgctgacacccccgatgattttcagctccataatttcagtctccctgaagaagacaccaaactgaagatacctctgattcacagagccttgcaactgtcccaaaggccagtgagcctcttcgcttctccctggactagtcctacatggctgaagactaatggtgctgttaatgggaaaggctccctgaaaggacagccaggtgacatatatcatcagacatgggcccgctactttgtgaaattccttgatgcctatgcagagcacaagctccaattctgggcagtcaccgcagaaaacgagccctcagctgggctgctgtctggctacccctttcagtgcttgggctttactcctgagcatcaacgggacttcattgcccgggatttggggccaacactggccaacagcacccaccacaatgtaagactcctcatgctggatgaccagaggctgctgctccctcattgggccaaggtggtgttgacagacccagaagctgccaaatatgttcatggcatcgctgtccactggtacctggattttttggcccctgcaaaggctactctgggagagacccacagactcttccccaataccatgctgtttgcatcagaagcctgcgtggggagcaaattctgggagcagtctgttaggctgggttcctgggatcggggcatgcaatattcccatagtataataactaacctcctctaccacgtggtaggatggacagactggaatctggctttgaacccagaaggaggccccaattgggtgcgcaactttgttgacagccccatcattgtggatatcacaaaggacaccttctacaaacagcctatgttctatcatctggggcactttagcaagttcattccagagggttcccagagagtaggcttggttgcctcacagaagaatgatctggatgctgtggcactcctgcatcctgacgggagtgcagtggtggtagtactgaacaggtctagcaaagatgttcccttgactatcaaagacccagctgtgggctttctggaaaccatttcccctggatactctatccacacctatctctggagaagacagtaatga

SEQ ID NO: 682 - protein, 536 aa, synthetic construct
  REGION 1..536: note = Variant of B-Glucocerebrosidase
MEFSSPSREECPKPLSRVSIMAGSLTGLLLLQAVSWASGARPCIPKSFGASSVVCVCNATYCDSFDPPTLPALGTFSRYESTRSGRRMELSMGPIQANHTGTGLLLTLQPEQKFQKVKGFGGAMTDAAALNILALSPPAQNLLLKSYFSEEGIGYNIIRVPMASCDFSIRTYTYADTPDDFQLHNFSLPEEDTKLKIPLIHRALQLSQRPVSLFASPWTSPTWLKTNGAVNGKGSLKGQPGDIYHQTWARYFVKFLDAYAEHKLQFWAVTAENEPSAGLLSGYPFQCLGFTPEHQRDFIARDLGPTLANSTHHNVRLLMLDDQRLLLPHWAKVVLTDPEAAKYVHGIAVHWYLDFLAPAKATLGETHRLFPNTMLFASEACVGSKFWEQSVRLGSWDRGMQYSHSIITNLLYHVVGWTDWNLALNPEGGPNWVRNFVDSPIIVDITKDTFYKQPMFYHLGHFSKFIPEGSQRVGLVASQKNDLDAVALLHPDGSAVVVVLNRSSKDVPLTIKDPAVGFLETISPGYSIHTYLWRRQ

SEQ ID NO: 683 - DNA, 1614 bp, synthetic construct
  misc_feature 1..1614: note = Variant of B-Glucocerebrosidase
  source 1..1614: mol_type = other DNA
atggagttttcttctcctagtagagaagaatgccccaagccactgagcagggtgagcatcatggctggatccctcacagggctgcttcttttgcaggcagtctcatgggcctctggagccaggccctgtattcccaagtcattcggctactcctcagtggtgtgtgtatgcaatgccacctattgtgacagtttcgatcctccaactctccctgctctgggtaccttctcccggtatgagagcacaagaagtggaagacgcatggagctctcaatgggccctatacaggctaaccacactgggacaggtctgctgctgaccctccaacctgaacagaagtttcagcgggtcaagggatttggaggagccatgactgatgcagcagcactcaacatcttggccctgtctccaccagcccagaatctgctgttgaagtcctacttctcagaggaggggattggctacaacatcatccgggttcccatggctagctgtgacttctccattaggacctatacatacgctgacacccccgatgattttcagctccataatttcagtctccctgaagaagacaccaaactgaagatacctctgattcacagagccttgcaactgtcccaaaggccagtgagcctcttcgcttctccctggactagtcctacatggctgaagactaatggtgctgttaatgggaaaggctccctgaaaggacagccaggtgacatatatcatcagacatgggcccgctactttgtgaaattccttgatgcctatgcagagcacaagctccaattctgggcagtcaccgcagaaaacgagccctcagctgggctgctgtctggctacccctttcagtgcttgggctttactcctgagcatcaacgggacttcattgcccgggatttggggccaacactggccaacagcacccaccacaatgtaagactcctcatgctggatgaccagaggctgctgctccctcattgggccaaggtggtgttgacagacccagaagctgccaaatatgttcatggcatcgctgtccactggtacctggattttttggcccctgcaaaggctactctgggagagacccacagactcttccccaataccatgctgtttgcatcagaagcctgcgtggggagcaaattctgggagcagtctgttaggctgggttcctgggatcggggcatgcaatattcccatagtataataactaacctcctctaccacgtggtaggatggacagactggaatctggctttgaacccagaaggaggccccaattgggtgcgcaactttgttgacagccccatcattgtggatatcacaaaggacaccttctacaaacagcctatgttctatcatctggggcactttagcaagttcattccagagggttcccagagagtaggcttggttgcctcacagaagaatgatctggatgctgtggcactcctgcatcctgacgggagtgcagtggtggtagtactgaacaggtctagcaaagatgttcccttgactatcaaagacccagctgtgggctttctggaaaccatttcccctggatactctatccacacctatctctggagaagacagtaatga

SEQ ID NO: 684 - protein, 536 aa, synthetic construct
  REGION 1..536: note = Variant of B-Glucocerebrosidase
MEFSSPSREECPKPLSRVSIMAGSLTGLLLLQAVSWASGARPCIPKSFGYSSVVCVCNATYCDSFDPPTLPALGTFSRYESTRSGRRMELSMGPIQANHTGTGLLLTLQPEQKFQRVKGFGGAMTDAAALNILALSPPAQNLLLKSYFSEEGIGYNIIRVPMASCDFSIRTYTYADTPDDFQLHNFSLPEEDTKLKIPLIHRALQLSQRPVSLFASPWTSPTWLKTNGAVNGKGSLKGQPGDIYHQTWARYFVKFLDAYAEHKLQFWAVTAENEPSAGLLSGYPFQCLGFTPEHQRDFIARDLGPTLANSTHHNVRLLMLDDQRLLLPHWAKVVLTDPEAAKYVHGIAVHWYLDFLAPAKATLGETHRLFPNTMLFASEACVGSKFWEQSVRLGSWDRGMQYSHSIITNLLYHVVGWTDWNLALNPEGGPNWVRNFVDSPIIVDITKDTFYKQPMFYHLGHFSKFIPEGSQRVGLVASQKNDLDAVALLHPDGSAVVVVLNRSSKDVPLTIKDPAVGFLETISPGYSIHTYLWRRQ

SEQ ID NO: 685 - DNA, 1614 bp, synthetic construct
  misc_feature 1..1614: note = Variant of B-Glucocerebrosidase
  source 1..1614: mol_type = other DNA
atggagttttcttctcctagtagagaagaatgccccaagccactgagcagggtgagcatcatggctggatccctcacagggctgcttcttttgcaggcagtctcatgggcctctggagccaggccctgtattcccaagtcattcggctactcctcagtggtgtgtgtatgcaatgccacctattgtgacagtttcgatcctccaactctccctgctctgggtaccttctcccggtatgagagcacaagaagtggaagacgcatggagctctcaatgggccctatacaggctaaccacactgggacaggtctgctgctgaccctccaacctgaacagaagtttcagaaagtcaagggatttggaggagccatgactgatgcagcagcactcaacatcttggccctgtctccaccagcccagaatctgctgttgaagtcctacttctcagaggaggggattggctacaacatcatccgggttcccatggctagctgtgacttctccattaggacctatacatacgctgacacccccgatgattttcagctccataatttcagtctccctgaagaagacaccaaactgaagatacctctgattcacagagccttgcaactgtcccaaaggccagtgagcctcttcgcttctccctggactagtcctacatggctgaagactaatggtgctgttaatgggaaaggctccctgaaaggaactccaggtgacatctatcatcagacatgggcccgctactttgtgaaattccttgatgcctatgcagagcacaagctccaattctgggcagtcaccgcagaaaacgagccctcagctgggctgctgtctggctacccctttcagtgcttgggctttactcctgagcatcaacgggacttcattgcccgggatttggggccaacactggccaacagcacccaccacaatgtaagactcctcatgctggatgaccagaggctgctgctccctcattgggccaaggtggtgttgacagacccagaagctgccaaatatgttcatggcatcgctgtccactggtacctggattttttggcccctgcaaaggctactctgggagagacccacagactcttccccaataccatgctgtttgcatcagaagcctgcgtggggagcaaattctgggagcagtctgttaggctgggttcctgggatcggggcatgcaatattcccatagtataataactaacctcctctaccacgtggtaggatggacagactggaatctggctttgaacccagaaggaggccccaattgggtgcgcaactttgttgacagccccatcattgtggatatcacaaaggacaccttctacaaacagcctatgttctatcatctggggcactttagcaagttcattccagagggttcccagagagtaggcttggttgcctcacagaagaatgatctggatgctgtggcactcctgcatcctgacgggagtgcagtggtggtagtactgaacaggtctagcaaagatgttcccttgactatcaaagacccagctgtgggctttctggaaaccatttcccctggatactctatccacacctatctctggagaagacagtaatga

SEQ ID NO: 686 - protein, 536 aa, synthetic construct
  REGION 1..536: note = Variant of B-Glucocerebrosidase
MEFSSPSREECPKPLSRVSIMAGSLTGLLLLQAVSWASGARPCIPKSFGYSSVVCVCNATYCDSFDPPTLPALGTFSRYESTRSGRRMELSMGPIQANHTGTGLLLTLQPEQKFQKVKGFGGAMTDAAALNILALSPPAQNLLLKSYFSEEGIGYNIIRVPMASCDFSIRTYTYADTPDDFQLHNFSLPEEDTKLKIPLIHRALQLSQRPVSLFASPWTSPTWLKTNGAVNGKGSLKGTPGDIYHQTWARYFVKFLDAYAEHKLQFWAVTAENEPSAGLLSGYPFQCLGFTPEHQRDFIARDLGPTLANSTHHNVRLLMLDDQRLLLPHWAKVVLTDPEAAKYVHGIAVHWYLDFLAPAKATLGETHRLFPNTMLFASEACVGSKFWEQSVRLGSWDRGMQYSHSIITNLLYHVVGWTDWNLALNPEGGPNWVRNFVDSPIIVDITKDTFYKQPMFYHLGHFSKFIPEGSQRVGLVASQKNDLDAVALLHPDGSAVVVVLNRSSKDVPLTIKDPAVGFLETISPGYSIHTYLWRRQ

SEQ ID NO: 687 - DNA, 1614 bp, synthetic construct
  misc_feature 1..1614: note = Variant of B-Glucocerebrosidase
  source 1..1614: mol_type = other DNA
atggagttttcttctcctagtagagaagaatgccccaagccactgagcagggtgagcatcatggctggatccctcacagggctgcttcttttgcaggcagtctcatgggcctctggagccaggccctgtgttcccaagtcattcggctactcctcagtggtgtgtgtatgcaatgccacctattgtgacagtttcgatcctccaactctccctgctctgggtaccttctcccggtatgagagcacaagaagtggaagacgcatggagctctcaatgggccctatacaggctaaccacactgggacaggtctgctgctgaccctccaacctgaacagaagtttcagaaagtcaagggatttggaggagccatgactgatgcagcagcactcaacatcttggccctgtctccaccagcccagaatctgctgttgaagtcctacttctcagaggaggggattggctacaacatcatccgggttcccatggctagctgtgacttctccattaggacctatacatacgctgacacccccgatgattttcagctccataatttcagtctccctgaagaagacaccaaactgaagatacctctgattcacagagccttgcaactgtcccaaaggccagtgagcctcttcgcttctccctggactagtcctacatggctgaagactaatggtgctgttaatgggaaaggctccctgaaaggacagccaggtgacatatatcatcagacatgggcccgctactttgtgaaattccttgatgcctatgcagagcacaagctccaattctgggcagtcaccgcagaaaacgagccctcagctgggctgctgtctggctacccctttcagtgcttgggctttactcctgagcatcaacgggacttcattgcccgggatttggggccaacactggccaacagcacccaccacaatgtaagactcctcatgctggatgaccagaggctgctgctccctcattgggccaaggtggtgttgacagacccagaagctgccaaatatgttcatggcatcgctgtccactggtacctggattttttggcccctgcaaaggctactctgggagagacccacagactcttccccaataccatgctgtttgcatcagaagcctgcgtggggagcaaattctgggagcagtctgttaggctgggttcctgggatcggggcatgcaatattcccatagtataataactaacctcctctaccacgtggtaggatggacagactggaatctggctttgaacccagaaggaggccccaattgggtgcgcaactttgttgacagccccatcattgtggatatcacaaaggacaccttctacaaacagcctatgttctatcatctggggcactttagcaagttcattccagagggttcccagagagtaggcttggttgcctcacagaagaatgatctggatgctgtggcactcctgcatcctgacgggagtgcagtggtggtagtactgaacaggtctagcaaagatgttcccttgactatcaaagacccagctgtgggctttctggaaaccatttcccctggatactctatccacacctatctctggagaagacagtaatga

SEQ ID NO: 688 - protein, 536 aa, synthetic construct
  REGION 1..536: note = Variant of B-Glucocerebrosidase
MEFSSPSREECPKPLSRVSIMAGSLTGLLLLQAVSWASGARPCVPKSFGYSSVVCVCNATYCDSFDPPTLPALGTFSRYESTRSGRRMELSMGPIQANHTGTGLLLTLQPEQKFQKVKGFGGAMTDAAALNILALSPPAQNLLLKSYFSEEGIGYNIIRVPMASCDFSIRTYTYADTPDDFQLHNFSLPEEDTKLKIPLIHRALQLSQRPVSLFASPWTSPTWLKTNGAVNGKGSLKGQPGDIYHQTWARYFVKFLDAYAEHKLQFWAVTAENEPSAGLLSGYPFQCLGFTPEHQRDFIARDLGPTLANSTHHNVRLLMLDDQRLLLPHWAKVVLTDPEAAKYVHGIAVHWYLDFLAPAKATLGETHRLFPNTMLFASEACVGSKFWEQSVRLGSWDRGMQYSHSIITNLLYHVVGWTDWNLALNPEGGPNWVRNFVDSPIIVDITKDTFYKQPMFYHLGHFSKFIPEGSQRVGLVASQKNDLDAVALLHPDGSAVVVVLNRSSKDVPLTIKDPAVGFLETISPGYSIHTYLWRRQ

SEQ ID NO: 689 - DNA, 1614 bp, synthetic construct
  misc_feature 1..1614: note = Variant of B-Glucocerebrosidase
  source 1..1614: mol_type = other DNA
atggagttttcttctcctagtagagaagaatgccccaagccactgagcagggtgagcatcatggctggatccctcacagggctgcttcttttgcaggcagtctcatgggcctctggatctaggccctgtattcccaagtcattcggctactcctcagtggtgtgtgtatgcaatgccacctattgtgacagtttcgatcctccaactctccctgctctgggtaccttctcccggtatgagagcacaagaagtggaagacgcatggagctctcaatgggccctatacaggctaaccacactgggacaggtctgctgctgaccctccaacctgaacagaagtttcagaaagtcaagggatttggaggagccatgactgatgcagcagcactcaacatcttggccctgtctccaccagcccagaatctgctgttgaagtcctacttctcagaggaggggattggctacaacatcatccgggttcccatggctagctgtgacttctccattaggacctatacatacgctgacacccccgatgattttcagctccataatttcagtctccctgaagaagacaccaaactgaagatacctctgattcacagagccttgcaactgtcccaaaggccagtgagcctcttcgcttctccctggactagtcctacatggctgaagactaatggtgctgttaatgggaaaggctccctgaaaggacagccaggtgacatatatcatcagacatgggcccgctactttgtgaaattccttgatgcctatgcagagcacaagctccaattctgggcagtcaccgcagaaaacgagccctcagctgggctgctgtctggctacccctttcagtgcttgggctttactcctgagcatcaacgggacttcattgcccgggatttggggccaacactggccaacagcacccaccacaatgtaagactcctcatgctggatgaccagaggctgctgctccctcattgggccaaggtggtgttgacagacccagaagctgccaaatatgttcatggcatcgctgtccactggtacctggattttttggcccctgcaaaggctactctgggagagacccacagactcttccccaataccatgctgtttgcatcagaagcctgcgtggggagcaaattctgggagcagtctgttaggctgggttcctgggatcggggcatgcaatattcccatagtataataactaacctcctctaccacgtggtaggatggacagactggaatctggctttgaacccagaaggaggccccaattgggtgcgcaactttgttgacagccccatcattgtggatatcacaaaggacaccttctacaaacagcctatgttctatcatctggggcactttagcaagttcattccagagggttcccagagagtaggcttggttgcctcacagaagaatgatctggatgctgtggcactcctgcatcctgacgggagtgcagtggtggtagtactgaacaggtctagcaaagatgttcccttgactatcaaagacccagctgtgggctttctggaaaccatttcccctggatactctatccacacctatctctggagaagacagtaatga

SEQ ID NO: 690 - protein, 536 aa, synthetic construct
  REGION 1..536: note = Variant of B-Glucocerebrosidase
MEFSSPSREECPKPLSRVSIMAGSLTGLLLLQAVSWASGSRPCIPKSFGYSSVVCVCNATYCDSFDPPTLPALGTFSRYESTRSGRRMELSMGPIQANHTGTGLLLTLQPEQKFQKVKGFGGAMTDAAALNILALSPPAQNLLLKSYFSEEGIGYNIIRVPMASCDFSIRTYTYADTPDDFQLHNFSLPEEDTKLKIPLIHRALQLSQRPVSLFASPWTSPTWLKTNGAVNGKGSLKGQPGDIYHQTWARYFVKFLDAYAEHKLQFWAVTAENEPSAGLLSGYPFQCLGFTPEHQRDFIARDLGPTLANSTHHNVRLLMLDDQRLLLPHWAKVVLTDPEAAKYVHGIAVHWYLDFLAPAKATLGETHRLFPNTMLFASEACVGSKFWEQSVRLGSWDRGMQYSHSIITNLLYHVVGWTDWNLALNPEGGPNWVRNFVDSPIIVDITKDTFYKQPMFYHLGHFSKFIPEGSQRVGLVASQKNDLDAVALLHPDGSAVVVVLNRSSKDVPLTIKDPAVGFLETISPGYSIHTYLWRRQ

SEQ ID NO: 691 - DNA, 1614 bp, synthetic construct
  misc_feature 1..1614: note = Variant of B-Glucocerebrosidase
  source 1..1614: mol_type = other DNA
atggagttttcttctcctagtagagaagaatgccccaagccactgagcagggtgagcatcatggctggatccctcacagggctgcttcttttgcaggcagtctcatgggcctctggagccaggccctgtattcccaagtcattcggctactcctcagtggtgtgtgtatgcaatgccacctattgtgacagtttcgatcctccaactctccctgctctgggtaccttctcccggtatgagagcacaagaagtggaagacgcatggagctctcaatgggccctatacaggctaaccacactgggacaggtctgctgctgaccctccaacctgaacagaattttcagaaagtcaagggatttggaggagccatgactgatgcagcagcactcaacatcttggccctgtctccaccagcccagaatctgctgttgaagtcctacttctcagaggaggggattggctacaacatcatccgggttcccatggctagctgtgacttctccattaggacctatacatacgctgacacccccgatgattttcagctccataatttcagtctccctgaagaagacaccaaactgaagatacctctgattcacagagccttgcaactgtcccaaaggccagtgagcctcttcgcttctccctggactagtcctacatggctgaagactaatggtgctgttaatgggaaaggctccctgaaaggacagccaggtgacatatatcatcagacatgggcccgctactttgtgaaattccttgatgcctatgcagagcacaagctccaattctgggcagtcaccgcagaaaacgagccctcagctgggctgctgtctggctacccctttcagtgcttgggctttactcctgagcatcaacgggacttcattgcccgggatttggggccaacactggccaacagcacccaccacaatgtaagactcctcatgctggatgaccagaggctgctgctccctcattgggccaaggtggtgttgacagacccagaagctgccaaatatgttcatggcatcgctgtccactggtacctggattttttggcccctgcaaaggctactctgggagagacccacagactcttccccaataccatgctgtttgcatcagaagcctgcgtggggagcaaattctgggagcagtctgttaggctgggttcctgggatcggggcatgcaatattcccatagtataataactaacctcctctaccacgtggtaggatggacagactggaatctggctttgaacccagaaggaggccccaattgggtgcgcaactttgttgacagccccatcattgtggatatcacaaaggacaccttctacaaacagcctatgttctatcatctggggcactttagcaagttcattccagagggttcccagagagtaggcttggttgcctcacagaagaatgatctggatgctgtggcactcctgcatcctgacgggagtgcagtggtggtagtactgaacaggtctagcaaagatgttcccttgactatcaaagacccagctgtgggctttctggaaaccatttcccctggatactctatccacacctatctctggagaagacagtaatga

SEQ ID NO: 692 - protein, 536 aa, synthetic construct
  REGION 1..536: note = Variant of B-Glucocerebrosidase
MEFSSPSREECPKPLSRVSIMAGSLTGLLLLQAVSWASGARPCIPKSFGYSSVVCVCNATYCDSFDPPTLPALGTFSRYESTRSGRRMELSMGPIQANHTGTGLLLTLQPEQNFQKVKGFGGAMTDAAALNILALSPPAQNLLLKSYFSEEGIGYNIIRVPMASCDFSIRTYTYADTPDDFQLHNFSLPEEDTKLKIPLIHRALQLSQRPVSLFASPWTSPTWLKTNGAVNGKGSLKGQPGDIYHQTWARYFVKFLDAYAEHKLQFWAVTAENEPSAGLLSGYPFQCLGFTPEHQRDFIARDLGPTLANSTHHNVRLLMLDDQRLLLPHWAKVVLTDPEAAKYVHGIAVHWYLDFLAPAKATLGETHRLFPNTMLFASEACVGSKFWEQSVRLGSWDRGMQYSHSIITNLLYHVVGWTDWNLALNPEGGPNWVRNFVDSPIIVDITKDTFYKQPMFYHLGHFSKFIPEGSQRVGLVASQKNDLDAVALLHPDGSAVVVVLNRSSKDVPLTIKDPAVGFLETISPGYSIHTYLWRRQ

SEQ ID NO: 693 - DNA, 1614 bp, synthetic construct
  misc_feature 1..1614: note = Variant of B-Glucocerebrosidase
  source 1..1614: mol_type = other DNA
atggagttttcttctcctagtagagaagaatgccccaagccactgagcagggtgagcatcatggctggatccctcacagggctgcttcttttgcaggcagtctcatgggcctctggagccaggccctgtattcccaagtcattcggctactcctcagtggtgtgtgtatgcaatgccacctattgtgacagtttcgatcctccaactctccctgctctgggtaccttctcccggtatgagagcacaagaagtggaagacgcatggagctcattatgggcccaatacaggctaaccacactgggacaggtctgctgctgaccctccaacctgaacagaagtttcagaaagtcaagggatttggaggagccatgactgatgcagcagcactcaacatcttggccctgtctccaccagcccagaatctgctgttgaagtcctacttctcagaggaggggattggctacaacatcatccgggttcccatggctagctgtgacttctccattaggacctatacatacgctgacacccccgatgattttcagctccataatttcagtctccctgaagaagacaccaaactgaagatacctctgattcacagagccttgcaactgtcccaaaggccagtgagcctcttcgcttctccctggactagtcctacatggctgaagactaatggtgctgttaatgggaaaggctccctgaaaggacagccaggtgacatatatcatcagacatgggcccgctactttgtgaaattccttgatgcctatgcagagcacaagctccaattctgggcagtcaccgcagaaaacgagccctcagctgggctgctgtctggctacccctttcagtgcttgggctttactcctgagcatcaacgggacttcattgcccgggatttggggccaacactggccaacagcacccaccacaatgtaagactcctcatgctggatgaccagaggctgctgctccctcattgggccaaggtggtgttgacagacccagaagctgccaaatatgttcatggcatcgctgtccactggtacctggattttttggcccctgcaaaggctactctgggagagacccacagactcttccccaataccatgctgtttgcatcagaagcctgcgtggggagcaaattctgggagcagtctgttaggctgggttcctgggatcggggcatgcaatattcccatagtataataactaacctcctctaccacgtggtaggatggacagactggaatctggctttgaacccagaaggaggccccaattgggtgcgcaactttgttgacagccccatcattgtggatatcacaaaggacaccttctacaaacagcctatgttctatcatctggggcactttagcaagttcattccagagggttcccagagagtaggcttggttgcctcacagaagaatgatctggatgctgtggcactcctgcatcctgacgggagtgcagtggtggtagtactgaacaggtctagcaaagatgttcccttgactatcaaagacccagctgtgggctttctggaaaccatttcccctggatactctatccacacctatctctggagaagacagtaatga

SEQ ID NO: 694 - protein, 536 aa, synthetic construct
  REGION 1..536: note = Variant of B-Glucocerebrosidase
MEFSSPSREECPKPLSRVSIMAGSLTGLLLLQAVSWASGARPCIPKSFGYSSVVCVCNATYCDSFDPPTLPALGTFSRYESTRSGRRMELIMGPIQANHTGTGLLLTLQPEQKFQKVKGFGGAMTDAAALNILALSPPAQNLLLKSYFSEEGIGYNIIRVPMASCDFSIRTYTYADTPDDFQLHNFSLPEEDTKLKIPLIHRALQLSQRPVSLFASPWTSPTWLKTNGAVNGKGSLKGQPGDIYHQTWARYFVKFLDAYAEHKLQFWAVTAENEPSAGLLSGYPFQCLGFTPEHQRDFIARDLGPTLANSTHHNVRLLMLDDQRLLLPHWAKVVLTDPEAAKYVHGIAVHWYLDFLAPAKATLGETHRLFPNTMLFASEACVGSKFWEQSVRLGSWDRGMQYSHSIITNLLYHVVGWTDWNLALNPEGGPNWVRNFVDSPIIVDITKDTFYKQPMFYHLGHFSKFIPEGSQRVGLVASQKNDLDAVALLHPDGSAVVVVLNRSSKDVPLTIKDPAVGFLETISPGYSIHTYLWRRQ

SEQ ID NO: 695 - DNA, 1614 bp, synthetic construct
  misc_feature 1..1614: note = Variant of B-Glucocerebrosidase
  source 1..1614: mol_type = other DNA
atggagttttcttctcctagtagagaagaatgccccaagccactgagcagggtgagcatcatggctggatccctcacagggctgcttcttttgcaggcagtctcatgggcctctggagccaggccctgtattcccaagtcattcggctactcctcagtggtgtgtgtatgcaatgccacctattgtgacagtttcgatcctccaactctccctgctctgggtaccttctcccggtatgagagcacaagaagtggaagacgcatggagctctcaatgggcccaatacaggctaactttactgggacaggtctgctgctgaccctccaacctgaacagaagtttcagaaagtcaagggatttggaggagccatgactgatgcagcagcactcaacatcttggccctgtctccaccagcccagaatctgctgttgaagtcctacttctcagaggaggggattggctacaacatcatccgggttcccatggctagctgtgacttctccattaggacctatacatacgctgacacccccgatgattttcagctccataatttcagtctccctgaagaagacaccaaactgaagatacctctgattcacagagccttgcaactgtcccaaaggccagtgagcctcttcgcttctccctggactagtcctacatggctgaagactaatggtgctgttaatgggaaaggctccctgaaaggacagccaggtgacatatatcatcagacatgggcccgctactttgtgaaattccttgatgcctatgcagagcacaagctccaattctgggcagtcaccgcagaaaacgagccctcagctgggctgctgtctggctacccctttcagtgcttgggctttactcctgagcatcaacgggacttcattgcccgggatttggggccaacactggccaacagcacccaccacaatgtaagactcctcatgctggatgaccagaggctgctgctccctcattgggccaaggtggtgttgacagacccagaagctgccaaatatgttcatggcatcgctgtccactggtacctggattttttggcccctgcaaaggctactctgggagagacccacagactcttccccaataccatgctgtttgcatcagaagcctgcgtggggagcaaattctgggagcagtctgttaggctgggttcctgggatcggggcatgcaatattcccatagtataataactaacctcctctaccacgtggtaggatggacagactggaatctggctttgaacccagaaggaggccccaattgggtgcgcaactttgttgacagccccatcattgtggatatcacaaaggacaccttctacaaacagcctatgttctatcatctggggcactttagcaagttcattccagagggttcccagagagtaggcttggttgcctcacagaagaatgatctggatgctgtggcactcctgcatcctgacgggagtgcagtggtggtagtactgaacaggtctagcaaagatgttcccttgactatcaaagacccagctgtgggctttctggaaaccatttcccctggatactctatccacacctatctctggagaagacagtaatga

SEQ ID NO: 696 - protein, 536 aa, synthetic construct
  REGION 1..536: note = Variant of B-Glucocerebrosidase
MEFSSPSREECPKPLSRVSIMAGSLTGLLLLQAVSWASGARPCIPKSFGYSSVVCVCNATYCDSFDPPTLPALGTFSRYESTRSGRRMELSMGPIQANFTGTGLLLTLQPEQKFQKVKGFGGAMTDAAALNILALSPPAQNLLLKSYFSEEGIGYNIIRVPMASCDFSIRTYTYADTPDDFQLHNFSLPEEDTKLKIPLIHRALQLSQRPVSLFASPWTSPTWLKTNGAVNGKGSLKGQPGDIYHQTWARYFVKFLDAYAEHKLQFWAVTAENEPSAGLLSGYPFQCLGFTPEHQRDFIARDLGPTLANSTHHNVRLLMLDDQRLLLPHWAKVVLTDPEAAKYVHGIAVHWYLDFLAPAKATLGETHRLFPNTMLFASEACVGSKFWEQSVRLGSWDRGMQYSHSIITNLLYHVVGWTDWNLALNPEGGPNWVRNFVDSPIIVDITKDTFYKQPMFYHLGHFSKFIPEGSQRVGLVASQKNDLDAVALLHPDGSAVVVVLNRSSKDVPLTIKDPAVGFLETISPGYSIHTYLWRRQ

SEQ ID NO: 697 - DNA, 1614 bp, synthetic construct
  misc_feature 1..1614: note = Variant of B-Glucocerebrosidase
  source 1..1614: mol_type = other DNA
atggagttttcttctcctagtagagaagaatgccccaagccactgagcagggtgagcatcatggctggatccctcacagggctgcttcttttgcaggcagtctcatgggcctctggagccaggccctgtattcccaagtcattcggctactcctcagtggtgtgtgtatgcaatgccacctattgtgacagtttcgatcctccaactctccctgctctgggtaccttctcccggtatgagagcacaagaagtggaagacgcatggagctctcaatgggccctatacaggctaaccacactgggacaggtctgctgctgaccctccaacctgaacagaagtttcagaaagtcaagggatttggaggagccatgactgatgcagcagcactcaacatcttggccctgtctccaccagcccagaatctgctgttgaagtcctacttctcagaggaggggattggctacaacatcatccgggttcccatggctagctgtgacttctccattaggacctatacatacgctgacacccccgatgattttcagctccataatttcagtctccctgaagaagacaccaaactgaagatacctctgattcacagagccttgcaactgtcccaaaggccagtgagcctcttcgcttctccctggactagtcctacatggctgaagactaatggtgctgttaatgggaaaggctccctgaaaggacagccaggtgacctttatcatcagacatgggcccgctactttgtgaaattccttgatgcctatgcagagcacaagctccaattctgggcagtcaccgcagaaaacgagccctcagctgggctgctgtctggctacccctttcagtgcttgggctttactcctgagcatcaacgggacttcattgcccgggatttggggccaacactggccaacagcacccaccacaatgtaagactcctcatgctggatgaccagaggctgctgctccctcattgggccaaggtggtgttgacagacccagaagctgccaaatatgttcatggcatcgctgtccactggtacctggattttttggcccctgcaaaggctactctgggagagacccacagactcttccccaataccatgctgtttgcatcagaagcctgcgtggggagcaaattctgggagcagtctgttaggctgggttcctgggatcggggcatgcaatattcccatagtataataactaacctcctctaccacgtggtaggatggacagactggaatctggctttgaacccagaaggaggccccaattgggtgcgcaactttgttgacagccccatcattgtggatatcacaaaggacaccttctacaaacagcctatgttctatcatctggggcactttagcaagttcattccagagggttcccagagagtaggcttggttgcctcacagaagaatgatctggatgctgtggcactcctgcatcctgacgggagtgcagtggtggtagtactgaacaggtctagcaaagatgttcccttgactatcaaagacccagctgtgggctttctggaaaccatttcccctggatactctatccacacctatctctggagaagacagtaatga

SEQ ID NO: 698 - protein, 536 aa, synthetic construct
  REGION 1..536: note = Variant of B-Glucocerebrosidase
MEFSSPSREECPKPLSRVSIMAGSLTGLLLLQAVSWASGARPCIPKSFGYSSVVCVCNATYCDSFDPPTLPALGTFSRYESTRSGRRMELSMGPIQANHTGTGLLLTLQPEQKFQKVKGFGGAMTDAAALNILALSPPAQNLLLKSYFSEEGIGYNIIRVPMASCDFSIRTYTYADTPDDFQLHNFSLPEEDTKLKIPLIHRALQLSQRPVSLFASPWTSPTWLKTNGAVNGKGSLKGQPGDLYHQTWARYFVKFLDAYAEHKLQFWAVTAENEPSAGLLSGYPFQCLGFTPEHQRDFIARDLGPTLANSTHHNVRLLMLDDQRLLLPHWAKVVLTDPEAAKYVHGIAVHWYLDFLAPAKATLGETHRLFPNTMLFASEACVGSKFWEQSVRLGSWDRGMQYSHSIITNLLYHVVGWTDWNLALNPEGGPNWVRNFVDSPIIVDITKDTFYKQPMFYHLGHFSKFIPEGSQRVGLVASQKNDLDAVALLHPDGSAVVVVLNRSSKDVPLTIKDPAVGFLETISPGYSIHTYLWRRQ

SEQ ID NO: 699 - DNA, 1614 bp, synthetic construct
  misc_feature 1..1614: note = Variant of B-Glucocerebrosidase
  source 1..1614: mol_type = other DNA
atggagttttcttctcctagtagagaagaatgccccaagccactgagcagggtgagcatcatggctggatccctcacagggctgcttcttttgcaggcagtctcatgggcctctggagccaggccctgtattcccaagtcattcggctactcctcagtggtgtgtgtatgcaatgccacctattgtgacagtttcgatcctccaactctccctgctctgggtaccttctcccggtatgagagcacaagaagtggaagacgcatggagctctcaatgggccctatacaggctaaccacactgggacaggtctgctgctgaccctccaacctgaacagaagtttcagaaagtcaagggatttggaggagccatgactgatgcagcagcactcaacatcttggccctgtctccaccagcccagaatctgctgttgaagtcctacttctcagaggaggggattggctacaacatcatccgggttcccatggctagctgtgacttctccgtgaggacctatacatacgctgacacccccgatgattttcagctccataatttcagtctccctgaagaagacaccaaactgaagatacctctgattcacagagccttgcaactgtcccaaaggccagtgagcctcttcgcttctccctggactagtcctacatggctgaagactaatggtgctgttaatgggaaaggctccctgaaaggacagccaggtgacatatatcatcagacatgggcccgctactttgtgaaattccttgatgcctatgcagagcacaagctccaattctgggcagtcaccgcagaaaacgagccctcagctgggctgctgtctggctacccctttcagtgcttgggctttactcctgagcatcaacgggacttcattgcccgggatttggggccaacactggccaacagcacccaccacaatgtaagactcctcatgctggatgaccagaggctgctgctccctcattgggccaaggtggtgttgacagacccagaagctgccaaatatgttcatggcatcgctgtccactggtacctggattttttggcccctgcaaaggctactctgggagagacccacagactcttccccaataccatgctgtttgcatcagaagcctgcgtggggagcaaattctgggagcagtctgttaggctgggttcctgggatcggggcatgcaatattcccatagtataataactaacctcctctaccacgtggtaggatggacagactggaatctggctttgaacccagaaggaggccccaattgggtgcgcaactttgttgacagccccatcattgtggatatcacaaaggacaccttctacaaacagcctatgttctatcatctggggcactttagcaagttcattccagagggttcccagagagtaggcttggttgcctcacagaagaatgatctggatgctgtggcactcctgcatcctgacgggagtgcagtggtggtagtactgaacaggtctagcaaagatgttcccttgactatcaaagacccagctgtgggctttctggaaaccatttcccctggatactctatccacacctatctctggagaagacagtaatga

SEQ ID NO: 700 - protein, 536 aa, synthetic construct
  REGION 1..536: note = Variant of B-Glucocerebrosidase
MEFSSPSREECPKPLSRVSIMAGSLTGLLLLQAVSWASGARPCIPKSFGYSSVVCVCNATYCDSFDPPTLPALGTFSRYESTRSGRRMELSMGPIQANHTGTGLLLTLQPEQKFQKVKGFGGAMTDAAALNILALSPPAQNLLLKSYFSEEGIGYNIIRVPMASCDFSVRTYTYADTPDDFQLHNFSLPEEDTKLKIPLIHRALQLSQRPVSLFASPWTSPTWLKTNGAVNGKGSLKGQPGDIYHQTWARYFVKFLDAYAEHKLQFWAVTAENEPSAGLLSGYPFQCLGFTPEHQRDFIARDLGPTLANSTHHNVRLLMLDDQRLLLPHWAKVVLTDPEAAKYVHGIAVHWYLDFLAPAKATLGETHRLFPNTMLFASEACVGSKFWEQSVRLGSWDRGMQYSHSIITNLLYHVVGWTDWNLALNPEGGPNWVRNFVDSPIIVDITKDTFYKQPMFYHLGHFSKFIPEGSQRVGLVASQKNDLDAVALLHPDGSAVVVVLNRSSKDVPLTIKDPAVGFLETISPGYSIHTYLWRRQ

SEQ ID NO: 701 - DNA, 1614 bp, synthetic construct
  misc_feature 1..1614: note = Variant of B-Glucocerebrosidase
  source 1..1614: mol_type = other DNA
atggagttttcttctcctagtagagaagaatgccccaagccactgagcagggtgagcatcatggctggatccctcacagggctgcttcttttgcaggcagtctcatgggcctctggagccaggccctgtattcccaagtcattcggctactcctcagtggtgtgtgtatgcaatgccacctattgtgacagtttcgatcctccaactctccctgctctgggtaccttctcccggtatgagagcacaagaagtggaagacgcatggagctctcaatgggccctatacaggctaaccacactgggacaggtctgctgctgaccctccaacctgaacagaagtttcagaaagtcaagggatttggaggagccatgactgatgcagcagcactcaacatcttggccctgtctccaccagcccagaatctgctgttgaagtcctacttctcagaggaggggattggctacaacatcatccgggttcccatggctagctgtgacttctccattaggacctatacatacgctgacacccccgatgattttcagctccataatttcagtctccctgaagaagacaccaaactgaagatacctctgattcacagagccttgcaactgtcccaaaggccagtgagcctcttcgcttctccctggactagtcctacatggctgaagactaatggtgctgttaatgggaaaggctccctgaaaggacagccaggtgacatatatcatcagacatgggcccgctactttgtgaaattccttgatgcctatgcagagcacaagctccaattctgggcagtcaccgcagaaaacgagccctcagctgggctgctgtctggctacccctttcagtgcttgggctttactcctgagcatcaacgggacttcattgcccgggatttggggccaacactggccaacagcacccaccacaatgtaagactcctcatgctggatgaccagaggctgctgctccctcattgggccaaggtggtgttgacagacccagaagctgccaaatatgttcatggcatcgctgtccactggtacctggattttttggcccctgcaaaggctactctgggagagacccacagactcttccccaataccatgctgtttgcatcagaagcctgcgtggggagcaaattctgggagcagtctgttaggctgggttcctgggatcggggcatgcaatattcccatagtataataactaacctcctctaccacgtggtaggatggacagactggaatctggctttgaacccagaaggaggccccaattgggtgcgcaactttgttgacagccccatcattgtggatatcacaaaggacaccttctacaaacagcctatgttctatcatctggggcactttagcaagttcattccagagggttcccagagagtaggcttggttgcctcacagaagaatgatctggatgctgtggcactcctgcatcctgacgggagtgcagtggtggtagtactgaacaggtctcctaaagatgttcccttgactatcaaagacccagctgtgggctttctggaaaccatttcccctggatactctatccacacctatctctggagaagacagtaatga

SEQ ID NO: 702 - protein, 536 aa, synthetic construct
  REGION 1..536: note = Variant of B-Glucocerebrosidase
MEFSSPSREECPKPLSRVSIMAGSLTGLLLLQAVSWASGARPCIPKSFGYSSVVCVCNATYCDSFDPPTLPALGTFSRYESTRSGRRMELSMGPIQANHTGTGLLLTLQPEQKFQKVKGFGGAMTDAAALNILALSPPAQNLLLKSYFSEEGIGYNIIRVPMASCDFSIRTYTYADTPDDFQLHNFSLPEEDTKLKIPLIHRALQLSQRPVSLFASPWTSPTWLKTNGAVNGKGSLKGQPGDIYHQTWARYFVKFLDAYAEHKLQFWAVTAENEPSAGLLSGYPFQCLGFTPEHQRDFIARDLGPTLANSTHHNVRLLMLDDQRLLLPHWAKVVLTDPEAAKYVHGIAVHWYLDFLAPAKATLGETHRLFPNTMLFASEACVGSKFWEQSVRLGSWDRGMQYSHSIITNLLYHVVGWTDWNLALNPEGGPNWVRNFVDSPIIVDITKDTFYKQPMFYHLGHFSKFIPEGSQRVGLVASQKNDLDAVALLHPDGSAVVVVLNRSPKDVPLTIKDPAVGFLETISPGYSIHTYLWRRQ

SEQ ID NO: 703 - DNA, 1614 bp, synthetic construct
  misc_feature 1..1614: note = Variant of B-Glucocerebrosidase
  source 1..1614: mol_type = other DNA
atggagttttcttctcctagtagagaagaatgccccaagccactgagcagggtgagcatcatggctggatccctcacagggctgcttcttttgcaggcagtctcatgggcctctggagccaggccctgtattcccaagtcattcggctactcctcagtggtgtgtgtatgcaatgccacctattgtgacagtttcgatcctccaactctccctgctctgggtaccttctcccggtatgagagcacaagaagtggaagacgcatggagctctcaatgggccctatacaggctaaccacactgggacaggtctgctgctgaccctccaacctgaacagaagtttcagaaagtcaagggatttggaggagccatgactgatgcagcagcactcaacatcttggccctgtctccaccagcccagaatctgctgttgaagtcctacttctcagaggaggggattggctacaacatcatccgggttcccatggctagctgtgacttctccattaggacctatacatacgctgacacccccgatgattttcagctccataatttcagtctccctgaagaagacaccaaactgaagatacctctgattcacagagccttgcaactgtcccaaaggccagtgagcctcttcgcttctccctggactagtcctacatggctgaagactaatggtgctgttaatgggaaaggctccctgaaaggacagccaggtgacatatatcatcagacatgggcccgctactttgtgaaattccttgatgcctatgcagagcacaagctccaattctgggcagtcaccgcagaaaacgagccctcagctgggctgctgtctggctacccctttcagtgcttgggctttactcctgagcatcaacgggacttcattgcccgggatttggggccaacactggccaacagcacccaccacaatgtaagactcctcatgctggatgaccagaggctgctgctccctcattgggccaaggtggtgttgacagacccagaagctgccaaatatgttcatggcatcgctgtccactggtacctggattttttggcccctgcaaaggctactctgggagagacccacagactcttccccaataccatgctgtttgcatcagaagcctgcgtggggagcaaattctgggagcagtctgttaggctgggttcctgggatcggggcatgcaatattcccatagtataataactaacctcctctaccacgtggtaggatggacagactggaatctggctttgaacccagaaggaggccccaattgggtgcgcaactttgttgacagccccatcattgtggatatcacaaaggacaccttctacaaacagcctatgttctatcatctggggcactttagcaagttcattccagagggttcccagagagtaggcttggttgcctcacagaagaatgatctggatgctgtggcactcctgcatcctgacgggagtgcagtggtggtagtactgaacaggtctagccgggatgttcccttgactatcaaagacccagctgtgggctttctggaaaccatttcccctggatactctatccacacctatctctggagaagacagtaatga

SEQ ID NO: 704 - protein, 536 aa, synthetic construct
  REGION 1..536: note = Variant of B-Glucocerebrosidase
MEFSSPSREECPKPLSRVSIMAGSLTGLLLLQAVSWASGARPCIPKSFGYSSVVCVCNATYCDSFDPPTLPALGTFSRYESTRSGRRMELSMGPIQANHTGTGLLLTLQPEQKFQKVKGFGGAMTDAAALNILALSPPAQNLLLKSYFSEEGIGYNIIRVPMASCDFSIRTYTYADTPDDFQLHNFSLPEEDTKLKIPLIHRALQLSQRPVSLFASPWTSPTWLKTNGAVNGKGSLKGQPGDIYHQTWARYFVKFLDAYAEHKLQFWAVTAENEPSAGLLSGYPFQCLGFTPEHQRDFIARDLGPTLANSTHHNVRLLMLDDQRLLLPHWAKVVLTDPEAAKYVHGIAVHWYLDFLAPAKATLGETHRLFPNTMLFASEACVGSKFWEQSVRLGSWDRGMQYSHSIITNLLYHVVGWTDWNLALNPEGGPNWVRNFVDSPIIVDITKDTFYKQPMFYHLGHFSKFIPEGSQRVGLVASQKNDLDAVALLHPDGSAVVVVLNRSSRDVPLTIKDPAVGFLETISPGYSIHTYLWRRQ

SEQ ID NO: 705 - DNA, 1614 bp, synthetic construct
  misc_feature 1..1614: note = Variant of B-Glucocerebrosidase
  source 1..1614: mol_type = other DNA
atggagttttcttctcctagtagagaagaatgccccaagccactgagcagggtgagcatcatggctggatccctcacagggctgcttcttttgcaggcagtctcatgggcctctggagccaggccctgtattcccaagtcattcggctactcctcagtggtgtgtgtatgcaatgccacctattgtgacagtttcgatcctccaactctccctgctctgggtaccttctcccggtatgagagcacaagaagtggaagacgcatggagctctcaatgggccctatacaggctaaccacactgggacaggtctgctgctgaccctccggcctgaacagaagtttcagaaagtcaagggatttggaggagccatgactgatgcagcagcactcaacatcttggccctgtctccaccagcccagaatctgctgttgaagtcctacttctcagaggaggggattggctacaacatcatccgggttcccatggctagctgtgacttctccattaggacctatacatacgctgacacccccgatgattttcagctccataatttcagtctccctgaagaagacaccaaactgaagatacctctgattcacagagccttgcaactgtcccaaaggccagtgagcctcttcgcttctccctggactagtcctacatggctgaagactaatggtgctgttaatgggaaaggctccctgaaaggacagccaggtgacatatatcatcagacatgggcccgctactttgtgaaattccttgatgcctatgcagagcacaagctccaattctgggcagtcaccgcagaaaacgagccctcagctgggctgctgtctggctacccctttcagtgcttgggctttactcctgagcatcaacgggacttcattgcccgggatttggggccaacactggccaacagcacccaccacaatgtaagactcctcatgctggatgaccagaggctgctgctccctcattgggccaaggtggtgttgacagacccagaagctgccaaatatgttcatggcatcgctgtccactggtacctggattttttggcccctgcaaaggctactctgggagagacccacagactcttccccaataccatgctgtttgcatcagaagcctgcgtggggagcaaattctgggagcagtctgttaggctgggttcctgggatcggggcatgcaatattcccatagtataataactaacctcctctaccacgtggtaggatggacagactggaatctggctttgaacccagaaggaggccccaattgggtgcgcaactttgttgacagccccatcattgtggatatcacaaaggacaccttctacaaacagcctatgttctatcatctggggcactttagcaagttcattccagagggttcccagagagtaggcttggttgcctcacagaagaatgatctggatgctgtggcactcctgcatcctgacgggagtgcagtggtggtagtactgaacaggtctagcaaagatgttcccttgactatcaaagacccagctgtgggctttctggaaaccatttcccctggatactctatccacacctatctctggagaagacagtaatga

SEQ ID NO: 706 - protein, 536 aa, synthetic construct
  REGION 1..536: note = Variant of B-Glucocerebrosidase
MEFSSPSREECPKPLSRVSIMAGSLTGLLLLQAVSWASGARPCIPKSFGYSSVVCVCNATYCDSFDPPTLPALGTFSRYESTRSGRRMELSMGPIQANHTGTGLLLTLRPEQKFQKVKGFGGAMTDAAALNILALSPPAQNLLLKSYFSEEGIGYNIIRVPMASCDFSIRTYTYADTPDDFQLHNFSLPEEDTKLKIPLIHRALQLSQRPVSLFASPWTSPTWLKTNGAVNGKGSLKGQPGDIYHQTWARYFVKFLDAYAEHKLQFWAVTAENEPSAGLLSGYPFQCLGFTPEHQRDFIARDLGPTLANSTHHNVRLLMLDDQRLLLPHWAKVVLTDPEAAKYVHGIAVHWYLDFLAPAKATLGETHRLFPNTMLFASEACVGSKFWEQSVRLGSWDRGMQYSHSIITNLLYHVVGWTDWNLALNPEGGPNWVRNFVDSPIIVDITKDTFYKQPMFYHLGHFSKFIPEGSQRVGLVASQKNDLDAVALLHPDGSAVVVVLNRSSKDVPLTIKDPAVGFLETISPGYSIHTYLWRRQ

SEQ ID NO: 707 - DNA, 1614 bp, synthetic construct
  misc_feature 1..1614: note = Variant of B-Glucocerebrosidase
  source 1..1614: mol_type = other DNA
atggagttttcttctcctagtagagaagaatgccccaagccactgagcagggtgagcatcatggctggatccctcacagggctgcttcttttgcaggcagtctcatgggcctctggagccaggccctgtattcccaagtcattcggctactcctcagtggtgtgtgtatgcaatgccacctattgtgacagtttcgatcctccaactctccctgctctgggtaccttctcccggtatgagagcacaagaagtggaagacgcatggagctctcaatgggccctatacaggctaaccacactgggacaggtctgctgctgaccctccaacctgaacagaagtttcagaaagtcaagggatttggaggagccatgactgatgcagcagcactcaacatcttggccctgtctccaccagcccagaatctgctgttgaagtcctacttctcagaggaggggattggctacaacatcatccgggttcccatggctagctgtgacttctccattaggacctatacatacgctgacacccccgatgattttcagctccataatttcagtctccctgaagaagacaccaaactgaagatacctctgattcacagagccttgcaactgtcccaaaggccagtgagcctcttcgcttctccctggactagtcctacatggctgaagactaatggtgctgttaatgggaaaggctccctgaaaggacagccaggtgacatatatcatcagacatgggcccgctactttgtgaaattccttgatgcctatgcagagcacaagctccaattctgggcagtcaccgcagaaaacgagccctcagctgggctgctgtctggctacccctttcagtgcttgggctttactcctgagcatcaacgggacttcattgcccgggatttggggccaacactggccaacagcacccaccacaatgtaagactcctcatgctggatgaccagaggctgctgctccctcattgggccaaggtggtgttgacagacccagaagctgccaaatatgttcatggcatcgctgtccactggtacctggattttttggcccctgcaaaggctactctgggagagacccacagactcttccccaataccatgctgtttgcatcagaagcctgcgtggggagcaaattctgggagcagtctgttaggctgggttcctgggatcggggcatgcaatattcccatagtataataactaacctcctctaccacgtggtaggatggacagactggaatctggctttgaacccagaaggaggccccaattgggtgcgcaactttgttgacagccccatcattgtggatatcacaaaggacaccttctacaaacagcctatgttctatcatctggggcactttagcaagttcattccagagggttcccagagagtaggcttggttgcctcacagaagaatgatctggatgctgtggcactcctgcatcctgacgggagtgcagtggtggtagtactgaacaggtctagcaaagatgttcccttgactatcaaagacccagctgtgggctttctggaaaccatttcccctggatactctatccacacctatctctggagaagaacttaatga

SEQ ID NO: 708 - protein, 536 aa, synthetic construct
  REGION 1..536: note = Variant of B-Glucocerebrosidase
MEFSSPSREECPKPLSRVSIMAGSLTGLLLLQAVSWASGARPCIPKSFGYSSVVCVCNATYCDSFDPPTLPALGTFSRYESTRSGRRMELSMGPIQANHTGTGLLLTLQPEQKFQKVKGFGGAMTDAAALNILALSPPAQNLLLKSYFSEEGIGYNIIRVPMASCDFSIRTYTYADTPDDFQLHNFSLPEEDTKLKIPLIHRALQLSQRPVSLFASPWTSPTWLKTNGAVNGKGSLKGQPGDIYHQTWARYFVKFLDAYAEHKLQFWAVTAENEPSAGLLSGYPFQCLGFTPEHQRDFIARDLGPTLANSTHHNVRLLMLDDQRLLLPHWAKVVLTDPEAAKYVHGIAVHWYLDFLAPAKATLGETHRLFPNTMLFASEACVGSKFWEQSVRLGSWDRGMQYSHSIITNLLYHVVGWTDWNLALNPEGGPNWVRNFVDSPIIVDITKDTFYKQPMFYHLGHFSKFIPEGSQRVGLVASQKNDLDAVALLHPDGSAVVVVLNRSSKDVPLTIKDPAVGFLETISPGYSIHTYLWRRT

SEQ ID NO: 709 - DNA, 1614 bp, synthetic construct
  misc_feature 1..1614: note = Variant of B-Glucocerebrosidase
  source 1..1614: mol_type = other DNA
atggagttttcttctcctagtagagaagaatgccccaagccactgagcagggtgagcatcatggctggatccctcacagggctgcttcttttgcaggcagtctcatgggcctctggagccaggccctgtattcccaagtcattcggctactcctcagtggtgtgtgtatgcaatgccacctattgtgacagtttcgatcctccaactctccctgctctgggtaccttctcccggtatgagagcacaagaagtggaagacgcatggagctctcaatgggccctatacaggctaaccacactgggacaggtctgctgctgaccctccaacctgaacagaagtttcagaaagtcaagggatttggaggagccatgactgatgcagcagcactcaacatcttggccctgtctccaccagcccagaatctgctgttgaagtcctacttctcagaggaggggattggctacaacatcatccgggttcccatggctagctgtgacttctccattaggacctatacatacgctgacacccccgatgattttcagctccataatttcagtctccctgaagaagacaccaaactgaagatacctctgattcacagagccttgcaactgtcccaaaggccagtgagcctcttcgcttctccctggactagtcctacatggctgaagactaatggtgctgttaatgggaaaggctccctgaaaggacagccaggtgacatatatcatcagacatgggcccgctactttgtgaaattccttgatgcctatgcagagcacaagctccaattctgggcagtcaccgcagaaaacgagccctcagctgggctgctgtctggctacccctttcagtgcttgggctttactcctgagcatcaacgggacttcattgcccgggatttggggccaacactggccaacagcacccaccacaatgtaagactcctcatgctggatgaccagaggctgctgctccctcattgggccaaggtggtgttgacagacccagaagctgccaaatatgttcatggcatcgctgtccactggtacctggattttttggcccctgcaaaggctactctgggagagacccacagactcttccccaataccatgctgtttgcatcagaagcctgcgtggggagcaaattctgggagcagtctgttaggctgggttcctgggatcggggcatgcaatattcccatagtataataactaacctcctctaccacgtggtaggatggacagactggaatctggctttgaacccagaaggaggccccaattgggtgcgcaactttgttgacagccccatcattgtggatatcacaaaggacaccttctacaaacagcctatgttctatcatctggggcactttagcaagttcattccagagggttcccagagagtaggcttggttgcctcagcgaagaatgatctggatgctgtggcactcctgcatcctgacgggagtgcagtggtggtagtactgaacaggtctagcaaagatgttcccttgactatcaaagacccagctgtgggctttctggaaaccatttcccctggatactctatccacacctatctctggagaagacagtaatga

SEQ ID NO: 710 - protein, 536 aa, synthetic construct
  REGION 1..536: note = Variant of B-Glucocerebrosidase
MEFSSPSREECPKPLSRVSIMAGSLTGLLLLQAVSWASGARPCIPKSFGYSSVVCVCNATYCDSFDPPTLPALGTFSRYESTRSGRRMELSMGPIQANHTGTGLLLTLQPEQKFQKVKGFGGAMTDAAALNILALSPPAQNLLLKSYFSEEGIGYNIIRVPMASCDFSIRTYTYADTPDDFQLHNFSLPEEDTKLKIPLIHRALQLSQRPVSLFASPWTSPTWLKTNGAVNGKGSLKGQPGDIYHQTWARYFVKFLDAYAEHKLQFWAVTAENEPSAGLLSGYPFQCLGFTPEHQRDFIARDLGPTLANSTHHNVRLLMLDDQRLLLPHWAKVVLTDPEAAKYVHGIAVHWYLDFLAPAKATLGETHRLFPNTMLFASEACVGSKFWEQSVRLGSWDRGMQYSHSIITNLLYHVVGWTDWNLALNPEGGPNWVRNFVDSPIIVDITKDTFYKQPMFYHLGHFSKFIPEGSQRVGLVASAKNDLDAVALLHPDGSAVVVVLNRSSKDVPLTIKDPAVGFLETISPGYSIHTYLWRRQ

SEQ ID NO: 711 - DNA, 1614 bp, synthetic construct
  misc_feature 1..1614: note = Variant of B-Glucocerebrosidase
  source 1..1614: mol_type = other DNA
atggagttttcttctcctagtagagaagaatgccccaagccactgagcagggtgagcatcatggctggatccctcacagggctgcttcttttgcaggcagtctcatgggcctctggagccaggccctgtattcccaagtcattcggctactcctcagtggtgtgtgtatgcaatgccacctattgtgacagtttcgatcctccaactctccctgctctgggtaccttctcccggtatgagagcacaagaagtggaagacgcatggagctctcaatgggccctatacaggctaaccacactgggacaggtctgctgctgaccctccaacctgaacagaagtttcagaaagtcaagggatttggaggagccatgactgatgcagcagcactcaacatcttggccctgtctccaccagcccagaatctgctgttgaagtcctacttctcagaggaggggattggctacaacatcatccgggttcccatggctagctgtgacttctccattaggacctatacatacgctgacacccccgatgattttcagctccataatttcagtctccctgaagaagacaccaaactgaagatacctctgattcacagagccttgcaactgtcccaaaggccagtgagcctcttcgcttctccctggactagtcctacatggctgaagactaatggtgctgttaatgggaaaggctccctgaaaggacagccaggtgacatatatcatcagacatgggcccgctactttgtgaaattccttgatgcctatgcagagcacaagctccaattctgggcagtcaccgcagaaaacgagccctcagctgggctgctgtctggctacccctttcagtgcttgggctttactcctgagcatcaacgggacttcattgcccgggatttggggccaacactggccaacagcacccaccacaatgtaagactcctcatgctggatgaccagaggctgctgctccctcattgggccaaggtggtgttgacagacccagaagctgccaaatatgttcatggcatcgctgtccactggtacctggattttttggcccctgcaaaggctactctgggagagacccacagactcttccccaataccatgctgtttgcatcagaagcctgcgtggggagcaaattctgggagcagtctgttaggctgggttcctgggatcggggcatgcaatattcccatagtataataactaacctcctctaccacgtggtaggatggacagactggaatctggctttgaacccagaaggaggccccaattgggtgcgcaactttgttgacagccccatcattgtggatatcacaaaggacaccttctacaaacagcctatgttctatcatctggggcactttagcaagttcattccagagggttcccagagagtaggcttggttgcctcactgaagaatgatctggatgctgtggcactcctgcatcctgacgggagtgcagtggtggtagtactgaacaggtctagcaaagatgttcccttgactatcaaagacccagctgtgggctttctggaaaccatttcccctggatactctatccacacctatctctggagaagacagtaatga

SEQ ID NO: 712 - protein, 536 aa, synthetic construct
  REGION 1..536: note = Variant of B-Glucocerebrosidase
MEFSSPSREECPKPLSRVSIMAGSLTGLLLLQAVSWASGARPCIPKSFGYSSVVCVCNATYCDSFDPPTLPALGTFSRYESTRSGRRMELSMGPIQANHTGTGLLLTLQPEQKFQKVKGFGGAMTDAAALNILALSPPAQNLLLKSYFSEEGIGYNIIRVPMASCDFSIRTYTYADTPDDFQLHNFSLPEEDTKLKIPLIHRALQLSQRPVSLFASPWTSPTWLKTNGAVNGKGSLKGQPGDIYHQTWARYFVKFLDAYAEHKLQFWAVTAENEPSAGLLSGYPFQCLGFTPEHQRDFIARDLGPTLANSTHHNVRLLMLDDQRLLLPHWAKVVLTDPEAAKYVHGIAVHWYLDFLAPAKATLGETHRLFPNTMLFASEACVGSKFWEQSVRLGSWDRGMQYSHSIITNLLYHVVGWTDWNLALNPEGGPNWVRNFVDSPIIVDITKDTFYKQPMFYHLGHFSKFIPEGSQRVGLVASLKNDLDAVALLHPDGSAVVVVLNRSSKDVPLTIKDPAVGFLETISPGYSIHTYLWRRQ

SEQ ID NO: 713 - DNA, 1614 bp, synthetic construct
  misc_feature 1..1614: note = Variant of B-Glucocerebrosidase
  source 1..1614: mol_type = other DNA
atggagttttcttctcctagtagagaagaatgccccaagccactgagcagggtgagcatcatggctggatccctcacagggctgcttcttttgcaggcagtctcatgggcctctggagccaggccctgtattcccaagtcattcggctactcctcagtggtgtgtgtatgcaatgccacctattgtgacagtttcgatcctccaactctccctgctctgggtaccttctcccggtatgagagcacaagaagtggaagacgcatggagctctcaatgggccctatacaggctaaccacactgggacaggtctgctgctgaccctccaacctgaacagaagtttcagaaagtcaagggatttggaggagccatgactgatgcagcagcactcaacatcttggccctgtctccaccagcccagaatctgctgttgaagtcctacttctcagaggaggggattggctacaacatcatccgggttcccatggctagctgtgacttctccattaggacctatacatacgctgacacccccgatgattttcagctccataatttcagtctccctgaagaagacaccaaactgaagatacctctgattcacagagccttgcaactgtcccaaaggccagtgagcctcttcgcttctccctggactagtcctacatggctgaagactaatggtgctgttaatgggaaaggctccctgaaaggacagccaggtgacatatatcatcagacatgggcccgctactttgtgaaattccttgatgcctatgcagagcacaagctccaattctgggcagtcaccgcagaaaacgagccctcagctgggctgctgtctggctacccctttcagtgcttgggctttactcctgagcatcaacgggacttcattgcccgggatttggggccaacactggccaacagcacccaccacaatgtaagactcctcatgctggatgaccagaggctgctgctccctcattgggccaaggtggtgttgacagacccagaagctgccaaatatgttcatggcatcgctgtccactggtacctggattttttggcccctgcaaaggctactctgggagagacccacagactcttccccaataccatgctgtttgcatcagaagcctgcgtggggagcaaattctgggagcagtctgttaggctgggttcctgggatcggggcatgcaatattcccatagtataataactaacctcctctaccacgtggtaggatggacagactggaatctggctttgaacccagaaggaggccccaattgggtgcgcaactttgttgacagccccatcattgtggatatcacaaaggacaccttctacaaacagcctatgttctatcatctggggcactttagcaagttcattccagagggttcccagagagtaggcttggttcattcacagaagaatgatctggatgctgtggcactcctgcatcctgacgggagtgcagtggtggtagtactgaacaggtctagcaaagatgttcccttgactatcaaagacccagctgtgggctttctggaaaccatttcccctggatactctatccacacctatctctggagaagacagtaatga

SEQ ID NO: 714 - protein, 536 aa, synthetic construct
  REGION 1..536: note = Variant of B-Glucocerebrosidase
MEFSSPSREECPKPLSRVSIMAGSLTGLLLLQAVSWASGARPCIPKSFGYSSVVCVCNATYCDSFDPPTLPALGTFSRYESTRSGRRMELSMGPIQANHTGTGLLLTLQPEQKFQKVKGFGGAMTDAAALNILALSPPAQNLLLKSYFSEEGIGYNIIRVPMASCDFSIRTYTYADTPDDFQLHNFSLPEEDTKLKIPLIHRALQLSQRPVSLFASPWTSPTWLKTNGAVNGKGSLKGQPGDIYHQTWARYFVKFLDAYAEHKLQFWAVTAENEPSAGLLSGYPFQCLGFTPEHQRDFIARDLGPTLANSTHHNVRLLMLDDQRLLLPHWAKVVLTDPEAAKYVHGIAVHWYLDFLAPAKATLGETHRLFPNTMLFASEACVGSKFWEQSVRLGSWDRGMQYSHSIITNLLYHVVGWTDWNLALNPEGGPNWVRNFVDSPIIVDITKDTFYKQPMFYHLGHFSKFIPEGSQRVGLVHSQKNDLDAVALLHPDGSAVVVVLNRSSKDVPLTIKDPAVGFLETISPGYSIHTYLWRRQ

SEQ ID NO: 715 - DNA, 1614 bp, synthetic construct
  misc_feature 1..1614: note = Variant of B-Glucocerebrosidase
  source 1..1614: mol_type = other DNA
atggagttttcttctcctagtagagaagaatgccccaagccactgagcagggtgagcatcatggctggatccctcacagggctgcttcttttgcaggcagtctcatgggcctctggagccaggccctgtattcccaagtcattcggctactcctcagtggtgtgtgtatgcaatgccacctattgtgacagtttcgatcctccaactctccctgctctgggtaccttctcccggtatgagagcacaagaaagggaagacgcatggagctctcaatgggccctatacaggctaaccacactgggacaggtctgctgctgaccctccaacctgaacagaagtttcagaaagtcaagggatttggaggagccatgactgatgcagcagcactcaacatcttggccctgtctccaccagcccagaatctgctgttgaagtcctacttctcagaggaggggattggctacaacatcatccgggttcccatggctagctgtgacttctccattaggacctatacatacgctgacacccccgatgattttcagctccataatttcagtctccctgaagaagacaccaaactgaagatacctctgattcacagagccttgcaactgtcccaaaggccagtgagcctcttcgcttctccctggactagtcctacatggctgaagactaatggtgctgttaatgggaaaggctccctgaaaggacagccaggtgacatatatcatcagacatgggcccgctactttgtgaaattccttgatgcctatgcagagcacaagctccaattctgggcagtcaccgcagaaaacgagccctcagctgggctgctgtctggctacccctttcagtgcttgggctttactcctgagcatcaacgggacttcattgcccgggatttggggccaacactggccaacagcacccaccacaatgtaagactcctcatgctggatgaccagaggctgctgctccctcattgggccaaggtggtgttgacagacccagaagctgccaaatatgttcatggcatcgctgtccactggtacctggattttttggcccctgcaaaggctactctgggagagacccacagactcttccccaataccatgctgtttgcatcagaagcctgcgtggggagcaaattctgggagcagtctgttaggctgggttcctgggatcggggcatgcaatattcccatagtataataactaacctcctctaccacgtggtaggatggacagactggaatctggctttgaacccagaaggaggccccaattgggtgcgcaactttgttgacagccccatcattgtggatatcacaaaggacaccttctacaaacagcctatgttctatcatctggggcactttagcaagttcattccagagggttcccagagagtaggcttggttgcctcacagaagaatgatctggatgctgtggcactcctgcatcctgacgggagtgcagtggtggtagtactgaacaggtctagcaaagatgttcccttgactatcaaagacccagctgtgggctttctggaaaccatttcccctggatactctatccacacctatctctggagaagacagtaatga

SEQ ID NO: 716 - protein, 536 aa, synthetic construct
  REGION 1..536: note = Variant of B-Glucocerebrosidase
MEFSSPSREECPKPLSRVSIMAGSLTGLLLLQAVSWASGARPCIPKSFGYSSVVCVCNATYCDSFDPPTLPALGTFSRYESTRKGRRMELSMGPIQANHTGTGLLLTLQPEQKFQKVKGFGGAMTDAAALNILALSPPAQNLLLKSYFSEEGIGYNIIRVPMASCDFSIRTYTYADTPDDFQLHNFSLPEEDTKLKIPLIHRALQLSQRPVSLFASPWTSPTWLKTNGAVNGKGSLKGQPGDIYHQTWARYFVKFLDAYAEHKLQFWAVTAENEPSAGLLSGYPFQCLGFTPEHQRDFIARDLGPTLANSTHHNVRLLMLDDQRLLLPHWAKVVLTDPEAAKYVHGIAVHWYLDFLAPAKATLGETHRLFPNTMLFASEACVGSKFWEQSVRLGSWDRGMQYSHSIITNLLYHVVGWTDWNLALNPEGGPNWVRNFVDSPIIVDITKDTFYKQPMFYHLGHFSKFIPEGSQRVGLVASQKNDLDAVALLHPDGSAVVVVLNRSSKDVPLTIKDPAVGFLETISPGYSIHTYLWRRQ

SEQ ID NO: 717 - DNA, 1614 bp, synthetic construct
  misc_feature 1..1614: note = Variant of B-Glucocerebrosidase
  source 1..1614: mol_type = other DNA
atggagttttcttctcctagtagagaagaatgccccaagccactgagcagggtgagcatcatggctggatccctcacagggctgcttcttttgcaggcagtctcatgggcctctggagccaggccctgtattcccaagtcattcggctactcctcagtggtgtgtgtatgcaatgccacctattgtgacagtttcgatcctccaactctccctgctctgggtaccttctcccggtatgagagcacaagaagtggaagacgcatggagctctcaatgggcccaatacagaataaccacactgggacaggtctgctgctgaccctccaacctgaacagaagtttcagaaagtcaagggatttggaggagccatgactgatgcagcagcactcaacatcttggccctgtctccaccagcccagaatctgctgttgaagtcctacttctcagaggaggggattggctacaacatcatccgggttcccatggctagctgtgacttctccattaggacctatacatacgctgacacccccgatgattttcagctccataatttcagtctccctgaagaagacaccaaactgaagatacctctgattcacagagccttgcaactgtcccaaaggccagtgagcctcttcgcttctccctggactagtcctacatggctgaagactaatggtgctgttaatgggaaaggctccctgaaaggacagccaggtgacatatatcatcagacatgggcccgctactttgtgaaattccttgatgcctatgcagagcacaagctccaattctgggcagtcaccgcagaaaacgagccctcagctgggctgctgtctggctacccctttcagtgcttgggctttactcctgagcatcaacgggacttcattgcccgggatttggggccaacactggccaacagcacccaccacaatgtaagactcctcatgctggatgaccagaggctgctgctccctcattgggccaaggtggtgttgacagacccagaagctgccaaatatgttcatggcatcgctgtccactggtacctggattttttggcccctgcaaaggctactctgggagagacccacagactcttccccaataccatgctgtttgcatcagaagcctgcgtggggagcaaattctgggagcagtctgttaggctgggttcctgggatcggggcatgcaatattcccatagtataataactaacctcctctaccacgtggtaggatggacagactggaatctggctttgaacccagaaggaggccccaattgggtgcgcaactttgttgacagccccatcattgtggatatcacaaaggacaccttctacaaacagcctatgttctatcatctggggcactttagcaagttcattccagagggttcccagagagtaggcttggttgcctcacagaagaatgatctggatgctgtggcactcctgcatcctgacgggagtgcagtggtggtagtactgaacaggtctagcaaagatgttcccttgactatcaaagacccagctgtgggctttctggaaaccatttcccctggatactctatccacacctatctctggagaagacagtaatga

SEQ ID NO: 718 - protein, 536 aa, synthetic construct
  REGION 1..536: note = Variant of B-Glucocerebrosidase
MEFSSPSREECPKPLSRVSIMAGSLTGLLLLQAVSWASGARPCIPKSFGYSSVVCVCNATYCDSFDPPTLPALGTFSRYESTRSGRRMELSMGPIQNNHTGTGLLLTLQPEQKFQKVKGFGGAMTDAAALNILALSPPAQNLLLKSYFSEEGIGYNIIRVPMASCDFSIRTYTYADTPDDFQLHNFSLPEEDTKLKIPLIHRALQLSQRPVSLFASPWTSPTWLKTNGAVNGKGSLKGQPGDIYHQTWARYFVKFLDAYAEHKLQFWAVTAENEPSAGLLSGYPFQCLGFTPEHQRDFIARDLGPTLANSTHHNVRLLMLDDQRLLLPHWAKVVLTDPEAAKYVHGIAVHWYLDFLAPAKATLGETHRLFPNTMLFASEACVGSKFWEQSVRLGSWDRGMQYSHSIITNLLYHVVGWTDWNLALNPEGGPNWVRNFVDSPIIVDITKDTFYKQPMFYHLGHFSKFIPEGSQRVGLVASQKNDLDAVALLHPDGSAVVVVLNRSSKDVPLTIKDPAVGFLETISPGYSIHTYLWRRQ

SEQ ID NO: 719 - DNA, 1614 bp, synthetic construct
  misc_feature 1..1614: note = Variant of B-Glucocerebrosidase
  source 1..1614: mol_type = other DNA
atggagttttcttctcctagtagagaagaatgccccaagccactgagcagggtgagcatcatggctggatccctcacagggctgcttcttttgcaggcagtctcatgggcctctggagccaggccctgtattcccaagtcattcggctactcctcagtggtgtgtgtatgcaatgccacctattgtgacagtttcgatcctccaactctccctgctctgggtaccttctcccggtatgagagcacaagaagtggaagacgcatggagctctcaatgggcccaatacagaagaaccacactgggacaggtctgctgctgaccctccaacctgaacagaagtttcagaaagtcaagggatttggaggagccatgactgatgcagcagcactcaacatcttggccctgtctccaccagcccagaatctgctgttgaagtcctacttctcagaggaggggattggctacaacatcatccgggttcccatggctagctgtgacttctccattaggacctatacatacgctgacacccccgatgattttcagctccataatttcagtctccctgaagaagacaccaaactgaagatacctctgattcacagagccttgcaactgtcccaaaggccagtgagcctcttcgcttctccctggactagtcctacatggctgaagactaatggtgctgttaatgggaaaggctccctgaaaggacagccaggtgacatatatcatcagacatgggcccgctactttgtgaaattccttgatgcctatgcagagcacaagctccaattctgggcagtcaccgcagaaaacgagccctcagctgggctgctgtctggctacccctttcagtgcttgggctttactcctgagcatcaacgggacttcattgcccgggatttggggccaacactggccaacagcacccaccacaatgtaagactcctcatgctggatgaccagaggctgctgctccctcattgggccaaggtggtgttgacagacccagaagctgccaaatatgttcatggcatcgctgtccactggtacctggattttttggcccctgcaaaggctactctgggagagacccacagactcttccccaataccatgctgtttgcatcagaagcctgcgtggggagcaaattctgggagcagtctgttaggctgggttcctgggatcggggcatgcaatattcccatagtataataactaacctcctctaccacgtggtaggatggacagactggaatctggctttgaacccagaaggaggccccaattgggtgcgcaactttgttgacagccccatcattgtggatatcacaaaggacaccttctacaaacagcctatgttctatcatctggggcactttagcaagttcattccagagggttcccagagagtaggcttggttgcctcacagaagaatgatctggatgctgtggcactcctgcatcctgacgggagtgcagtggtggtagtactgaacaggtctagcaaagatgttcccttgactatcaaagacccagctgtgggctttctggaaaccatttcccctggatactctatccacacctatctctggagaagacagtaatga

SEQ ID NO: 720 - protein, 536 aa, synthetic construct
  REGION 1..536: note = Variant of B-Glucocerebrosidase
MEFSSPSREECPKPLSRVSIMAGSLTGLLLLQAVSWASGARPCIPKSFGYSSVVCVCNATYCDSFDPPTLPALGTFSRYESTRSGRRMELSMGPIQKNHTGTGLLLTLQPEQKFQKVKGFGGAMTDAAALNILALSPPAQNLLLKSYFSEEGIGYNIIRVPMASCDFSIRTYTYADTPDDFQLHNFSLPEEDTKLKIPLIHRALQLSQRPVSLFASPWTSPTWLKTNGAVNGKGSLKGQPGDIYHQTWARYFVKFLDAYAEHKLQFWAVTAENEPSAGLLSGYPFQCLGFTPEHQRDFIARDLGPTLANSTHHNVRLLMLDDQRLLLPHWAKVVLTDPEAAKYVHGIAVHWYLDFLAPAKATLGETHRLFPNTMLFASEACVGSKFWEQSVRLGSWDRGMQYSHSIITNLLYHVVGWTDWNLALNPEGGPNWVRNFVDSPIIVDITKDTFYKQPMFYHLGHFSKFIPEGSQRVGLVASQKNDLDAVALLHPDGSAVVVVLNRSSKDVPLTIKDPAVGFLETISPGYSIHTYLWRRQ

SEQ ID NO: 721 - DNA, 1614 bp, synthetic construct
  misc_feature 1..1614: note = Variant of B-Glucocerebrosidase
  source 1..1614: mol_type = other DNA
atggagttttcttctcctagtagagaagaatgccccaagccactgagcagggtgagcatcatggctggatccctcacagggctgcttcttttgcaggcagtctcatgggcctctggagccaggccctgtattcccaagtcattcggctactcctcagtggtgtgtgtatgcaatgccacctattgtgacagtttcgatcctccaactctccctgctctgggtaccttctcccggtatgagagcacaagaagtggaagacgcatggagctctcaatgggccctatacaggctaaccacactgggacaggtctgctgctgaccctccaacctgaacagaagtttcagaaagtcaagggatttggaggagccatgactgatgcagcagcactcaacatcttggccctgtctccaccagcccagaatctgctgttgaagtcctacttctcagaggaggggattggctacaacatcatccgggttcccatggctagctgtgacttctccattaggacctatacatacgctgacacccccgatgattttatgctccataatttcagtctccctgaagaagacaccaaactgaagatacctctgattcacagagccttgcaactgtcccaaaggccagtgagcctcttcgcttctccctggactagtcctacatggctgaagactaatggtgctgttaatgggaaaggctccctgaaaggacagccaggtgacatatatcatcagacatgggcccgctactttgtgaaattccttgatgcctatgcagagcacaagctccaattctgggcagtcaccgcagaaaacgagccctcagctgggctgctgtctggctacccctttcagtgcttgggctttactcctgagcatcaacgggacttcattgcccgggatttggggccaacactggccaacagcacccaccacaatgtaagactcctcatgctggatgaccagaggctgctgctccctcattgggccaaggtggtgttgacagacccagaagctgccaaatatgttcatggcatcgctgtccactggtacctggattttttggcccctgcaaaggctactctgggagagacccacagactcttccccaataccatgctgtttgcatcagaagcctgcgtggggagcaaattctgggagcagtctgttaggctgggttcctgggatcggggcatgcaatattcccatagtataataactaacctcctctaccacgtggtaggatggacagactggaatctggctttgaacccagaaggaggccccaattgggtgcgcaactttgttgacagccccatcattgtggatatcacaaaggacaccttctacaaacagcctatgttctatcatctggggcactttagcaagttcattccagagggttcccagagagtaggcttggttgcctcacagaagaatgatctggatgctgtggcactcctgcatcctgacgggagtgcagtggtggtagtactgaacaggtctagcaaagatgttcccttgactatcaaagacccagctgtgggctttctggaaaccatttcccctggatactctatccacacctatctctggagaagacagtaatga

SEQ ID NO: 722 - protein, 536 aa, synthetic construct
  REGION 1..536: note = Variant of B-Glucocerebrosidase
MEFSSPSREECPKPLSRVSIMAGSLTGLLLLQAVSWASGARPCIPKSFGYSSVVCVCNATYCDSFDPPTLPALGTFSRYESTRSGRRMELSMGPIQANHTGTGLLLTLQPEQKFQKVKGFGGAMTDAAALNILALSPPAQNLLLKSYFSEEGIGYNIIRVPMASCDFSIRTYTYADTPDDFMLHNFSLPEEDTKLKIPLIHRALQLSQRPVSLFASPWTSPTWLKTNGAVNGKGSLKGQPGDIYHQTWARYFVKFLDAYAEHKLQFWAVTAENEPSAGLLSGYPFQCLGFTPEHQRDFIARDLGPTLANSTHHNVRLLMLDDQRLLLPHWAKVVLTDPEAAKYVHGIAVHWYLDFLAPAKATLGETHRLFPNTMLFASEACVGSKFWEQSVRLGSWDRGMQYSHSIITNLLYHVVGWTDWNLALNPEGGPNWVRNFVDSPIIVDITKDTFYKQPMFYHLGHFSKFIPEGSQRVGLVASQKNDLDAVALLHPDGSAVVVVLNRSSKDVPLTIKDPAVGFLETISPGYSIHTYLWRRQ

SEQ ID NO: 723 - DNA, 1614 bp, synthetic construct
  misc_feature 1..1614: note = Variant of B-Glucocerebrosidase
  source 1..1614: mol_type = other DNA
atggagttttcttctcctagtagagaagaatgccccaagccactgagcagggtgagcatcatggctggatccctcacagggctgcttcttttgcaggcagtctcatgggcctctggagccaggccctgtattcccaagtcattcggctactcctcagtggtgtgtgtatgcaatgccacctattgtgacagtttcgatcctccaactctccctgctctgggtaccttctcccggtatgagagcacaagaagtggaagacgcatggagctctcaatgggccctatacaggctaaccacactgggacaggtctgctgctgaccctccaacctcatcagaagtttcagaaagtcaagggatttggaggagccatgactgatgcagcagcactcaacatcttggccctgtctccaccagcccagaatctgctgttgaagtcctacttctcagaggaggggattggctacaacatcatccgggttcccatggctagctgtgacttctccattaggacctatacatacgctgacacccccgatgattttcagctccataatttcagtctccctgaagaagacaccaaactgaagatacctctgattcacagagccttgcaactgtcccaaaggccagtgagcctcttcgcttctccctggactagtcctacatggctgaagactaatggtgctgttaatgggaaaggctccctgaaaggacagccaggtgacatatatcatcagacatgggcccgctactttgtgaaattccttgatgcctatgcagagcacaagctccaattctgggcagtcaccgcagaaaacgagccctcagctgggctgctgtctggctacccctttcagtgcttgggctttactcctgagcatcaacgggacttcattgcccgggatttggggccaacactggccaacagcacccaccacaatgtaagactcctcatgctggatgaccagaggctgctgctccctcattgggccaaggtggtgttgacagacccagaagctgccaaatatgttcatggcatcgctgtccactggtacctggattttttggcccctgcaaaggctactctgggagagacccacagactcttccccaataccatgctgtttgcatcagaagcctgcgtggggagcaaattctgggagcagtctgttaggctgggttcctgggatcggggcatgcaatattcccatagtataataactaacctcctctaccacgtggtaggatggacagactggaatctggctttgaacccagaaggaggccccaattgggtgcgcaactttgttgacagccccatcattgtggatatcacaaaggacaccttctacaaacagcctatgttctatcatctggggcactttagcaagttcattccagagggttcccagagagtaggcttggttgcctcacagaagaatgatctggatgctgtggcactcctgcatcctgacgggagtgcagtggtggtagtactgaacaggtctagcaaagatgttcccttgactatcaaagacccagctgtgggctttctggaaaccatttcccctggatactctatccacacctatctctggagaagacagtaatga

SEQ ID NO: 724 - protein, 536 aa, synthetic construct
  REGION 1..536: note = Variant of B-Glucocerebrosidase
MEFSSPSREECPKPLSRVSIMAGSLTGLLLLQAVSWASGARPCIPKSFGYSSVVCVCNATYCDSFDPPTLPALGTFSRYESTRSGRRMELSMGPIQANHTGTGLLLTLQPHQKFQKVKGFGGAMTDAAALNILALSPPAQNLLLKSYFSEEGIGYNIIRVPMASCDFSIRTYTYADTPDDFQLHNFSLPEEDTKLKIPLIHRALQLSQRPVSLFASPWTSPTWLKTNGAVNGKGSLKGQPGDIYHQTWARYFVKFLDAYAEHKLQFWAVTAENEPSAGLLSGYPFQCLGFTPEHQRDFIARDLGPTLANSTHHNVRLLMLDDQRLLLPHWAKVVLTDPEAAKYVHGIAVHWYLDFLAPAKATLGETHRLFPNTMLFASEACVGSKFWEQSVRLGSWDRGMQYSHSIITNLLYHVVGWTDWNLALNPEGGPNWVRNFVDSPIIVDITKDTFYKQPMFYHLGHFSKFIPEGSQRVGLVASQKNDLDAVALLHPDGSAVVVVLNRSSKDVPLTIKDPAVGFLETISPGYSIHTYLWRRQ

SEQ ID NO: 725 - DNA, 1614 bp, synthetic construct
  misc_feature 1..1614: note = Variant of B-Glucocerebrosidase
  source 1..1614: mol_type = other DNA
atggagttttcttctcctagtagagaagaatgccccaagccactgagcagggtgagcatcatggctggatccctcacagggctgcttcttttgcaggcagtctcatgggcctctggagccaggccctgtattcccaagtcattcggctactcctcagtggtgtgtgtatgcaatgccacctattgtgacagtttcgatcctccaactctccctgctctgggtaccttctcccggtatgagagcacaagaagtggaagacgcatggagctctcaatgggccctatacaggctaaccacactgggacaggtctgctgctgaccctccaacctgaacagaagtttcagaaagtcaagggatttggaggagccatgactgatgcagcagcactcaacatcttggccctgtctccaccagcccagaatctgctgttgaagtcctacttctcagaggaggggattggctacaacatcatccgggttcccatggctagctgtgacttctccattaggacctatacatacgctgacacccccgatgattttcagctccataatttcagtctccctgaagaagacaccaaactgaagatacctctgattcacagagccttgcaactgtcccaaaggccagtgagcctcttcgcttctccctggactagtcctacatggctgaagactaatggtgctgttaatgggaaaggctccctgaaaggacagccaggtgacatatatcatcagacatgggcccgctactttgtgaaattccttgatgcctatgcagagcacaagctccaattctgggcagtcaccgcagaaaacgagccctcagctgggctgctgtctggctacccctttcagtgcttgggctttactcctgagcatcaacgggacttcattgcccgggatttggggccaacactggccaacagcacccaccacaatgtaagactcctcatgctggatgaccagaggctgctgctccctcattgggccaaggtggtgttgacagacccagaagctgccaaatatgttcatggcatcgctgtccactggtacctggattttttggcccctgcaaagtatactctgggagagacccacagactcttccccaataccatgctgtttgcatcagaagcctgcgtggggagcaaattctgggagcagtctgttaggctgggttcctgggatcggggcatgcaatattcccatagtataataactaacctcctctaccacgtggtaggatggacagactggaatctggctttgaacccagaaggaggccccaattgggtgcgcaactttgttgacagccccatcattgtggatatcacaaaggacaccttctacaaacagcctatgttctatcatctggggcactttagcaagttcattccagagggttcccagagagtaggcttggttgcctcacagaagaatgatctggatgctgtggcactcctgcatcctgacgggagtgcagtggtggtagtactgaacaggtctagcaaagatgttcccttgactatcaaagacccagctgtgggctttctggaaaccatttcccctggatactctatccacacctatctctggagaagacagtaatga

SEQ ID NO: 726 - protein, 536 aa, synthetic construct
  REGION 1..536: note = Variant of B-Glucocerebrosidase
MEFSSPSREECPKPLSRVSIMAGSLTGLLLLQAVSWASGARPCIPKSFGYSSVVCVCNATYCDSFDPPTLPALGTFSRYESTRSGRRMELSMGPIQANHTGTGLLLTLQPEQKFQKVKGFGGAMTDAAALNILALSPPAQNLLLKSYFSEEGIGYNIIRVPMASCDFSIRTYTYADTPDDFQLHNFSLPEEDTKLKIPLIHRALQLSQRPVSLFASPWTSPTWLKTNGAVNGKGSLKGQPGDIYHQTWARYFVKFLDAYAEHKLQFWAVTAENEPSAGLLSGYPFQCLGFTPEHQRDFIARDLGPTLANSTHHNVRLLMLDDQRLLLPHWAKVVLTDPEAAKYVHGIAVHWYLDFLAPAKYTLGETHRLFPNTMLFASEACVGSKFWEQSVRLGSWDRGMQYSHSIITNLLYHVVGWTDWNLALNPEGGPNWVRNFVDSPIIVDITKDTFYKQPMFYHLGHFSKFIPEGSQRVGLVASQKNDLDAVALLHPDGSAVVVVLNRSSKDVPLTIKDPAVGFLETISPGYSIHTYLWRRQ

SEQ ID NO: 727 - DNA, 1614 bp, synthetic construct
  misc_feature 1..1614: note = Variant of B-Glucocerebrosidase
  source 1..1614: mol_type = other DNA
atggagttttcttctcctagtagagaagaatgccccaagccactgagcagggtgagcatcatggctggatccctcacagggctgcttcttttgcaggcagtctcatgggcctctggagccaggccctgtattcccaagtcattcggctactcctcagtggtgtgtgtatgcaatgccacctattgtgacagtttcgatcctccaactctccctgctctgggtaccttctcccggtatgagagcacaagaagtggaagacgcatggagctctcaatgggccctatacaggctaaccacactgggacaggtctgctgctgaccctccaacctgaacagaagtttcagaaagtcaagggatttggaggagccatgactgatgcagcagcactcaacatcttggccctgtctccaccagcccagaatctgctgttgaagtcctacttctcagaggaggggattggctacaacatcatccgggttcccatggctagctgtgacttctccattaggacctatacatacgctgacacccccgatgattttcagctccataatttcagtctccctgaagaagacaccaaactgaagatacctctgattcacagagccttgcaactgtcccaaaggccagtgagcctcttcgcttctccctggactagtcctacatggctgaagactaatggtgctgttaatgggaaaggctccctgaaaggacagccaggtgacatatatcatcagacatgggcccgctactttgtgaaattccttgatgcctatgcagagcacaagctccaattctgggcagtcaccgcagaaaacgagccctcagctgggctgctgtctggctacccctttcagtgcttgggctttactcctgagcatcaacgggacttcattgcccgggatttggggccaacactggccaacagcacccaccacaatgtaagactcctcatgctggatgaccagaggctgctgctccctcattgggccaaggtggtgttgacagacccagaagctgccaaatatgttcatggcatcgctgtccactggtacctggattttttggcccctgcaaaggctactctgggagagacccacagactcttccccaataccatgctgtttgcatcagaagcctgcgtggggagcaaattctgggagcagtctgttaggctgggttcctgggatcggggcatgcaatattcccatagtataataactaacctcctctaccacgtggtaggatggacagactggaatctggctttgaacccagaaggaggccccaattgggtgcgcaactttgttgacagccccatcattgtggatatcacaaaggacaccttctacaaacagcctatgttctatcatctggggcactttagcaagttcattccagagggttcccagagagtaggcttggttgcctcacagaagaatgatctggatgctgtggcactcctgcatcctgacgggagtgcagtggtggtagtactgaacaggtctagcaaagatgttaggttgactatcaaagacccagctgtgggctttctggaaaccatttcccctggatactctatccacacctatctctggagaagacagtaatga

SEQ ID NO: 728 - protein, 536 aa, synthetic construct
  REGION 1..536: note = Variant of B-Glucocerebrosidase
MEFSSPSREECPKPLSRVSIMAGSLTGLLLLQAVSWASGARPCIPKSFGYSSVVCVCNATYCDSFDPPTLPALGTFSRYESTRSGRRMELSMGPIQANHTGTGLLLTLQPEQKFQKVKGFGGAMTDAAALNILALSPPAQNLLLKSYFSEEGIGYNIIRVPMASCDFSIRTYTYADTPDDFQLHNFSLPEEDTKLKIPLIHRALQLSQRPVSLFASPWTSPTWLKTNGAVNGKGSLKGQPGDIYHQTWARYFVKFLDAYAEHKLQFWAVTAENEPSAGLLSGYPFQCLGFTPEHQRDFIARDLGPTLANSTHHNVRLLMLDDQRLLLPHWAKVVLTDPEAAKYVHGIAVHWYLDFLAPAKATLGETHRLFPNTMLFASEACVGSKFWEQSVRLGSWDRGMQYSHSIITNLLYHVVGWTDWNLALNPEGGPNWVRNFVDSPIIVDITKDTFYKQPMFYHLGHFSKFIPEGSQRVGLVASQKNDLDAVALLHPDGSAVVVVLNRSSKDVRLTIKDPAVGFLETISPGYSIHTYLWRRQ

SEQ ID NO: 729 - DNA, 1614 bp, synthetic construct
  misc_feature 1..1614: note = Variant of B-Glucocerebrosidase
  source 1..1614: mol_type = other DNA
atggagttttcttctcctagtagagaagaatgccccaagccactgagcagggtgagcatcatggctggatccctcacagggctgcttcttttgcaggcagtctcatgggcctctggagccaggccctgtattcccaagtcattcggctactcctcagtggtgtgtgtatgcaatgccacctattgtgacagtttcgatcctccaactctccctgctctgggtaccttctcccggtatgagagcacaagaagtggaagacgcatggagctctcaatgggccctatacaggctaaccacactgggacaggtctgctgctgaccctccaacctgaacagaagtttcagaaagtcaagggatttggaggagccatgactgatgcagcagcactcaacatcttggccctgtctccaccagcccagaatctgctgttgaagtcctacttctcagaggaggggattggctacaacatcatccgggttcccatggctagctgtgacttctccattaggacctatacatacgctgacacccccgatgattttcagctccataatttcagtctccctgaagaagacaccaaactgaagatacctctgattcacagagccttgcaactgtcccaaaggccagtgagcctcttcgcttctccctggactagtcctacatggctgaagactaatggtgctgttaatgggaaaggctccctgaaaggacagccaggtgacatatatcatcagacatgggcccgctactttgtgaaattccttgatgcctatgcagagcacaagctccaattctgggcagtcaccgcagaaaacgagccctcagctgggctgctgtctggctacccctttcagtgcttgggctttactcctgagcatcaacgggacttcattgcccgggatttggggccaacactggccaacagcacccaccacagggtaagactcctcatgctggatgaccagaggctgctgctccctcattgggccaaggtggtgttgacagacccagaagctgccaaatatgttcatggcatcgctgtccactggtacctggattttttggcccctgcaaaggctactctgggagagacccacagactcttccccaataccatgctgtttgcatcagaagcctgcgtggggagcaaattctgggagcagtctgttaggctgggttcctgggatcggggcatgcaatattcccatagtataataactaacctcctctaccacgtggtaggatggacagactggaatctggctttgaacccagaaggaggccccaattgggtgcgcaactttgttgacagccccatcattgtggatatcacaaaggacaccttctacaaacagcctatgttctatcatctggggcactttagcaagttcattccagagggttcccagagagtaggcttggttgcctcacagaagaatgatctggatgctgtggcactcctgcatcctgacgggagtgcagtggtggtagtactgaacaggtctagcaaagatgttcccttgactatcaaagacccagctgtgggctttctggaaaccatttcccctggatactctatccacacctatctctggagaagacagtaatga

SEQ ID NO: 730 - protein, 536 aa, synthetic construct
  REGION 1..536: note = Variant of B-Glucocerebrosidase
MEFSSPSREECPKPLSRVSIMAGSLTGLLLLQAVSWASGARPCIPKSFGYSSVVCVCNATYCDSFDPPTLPALGTFSRYESTRSGRRMELSMGPIQANHTGTGLLLTLQPEQKFQKVKGFGGAMTDAAALNILALSPPAQNLLLKSYFSEEGIGYNIIRVPMASCDFSIRTYTYADTPDDFQLHNFSLPEEDTKLKIPLIHRALQLSQRPVSLFASPWTSPTWLKTNGAVNGKGSLKGQPGDIYHQTWARYFVKFLDAYAEHKLQFWAVTAENEPSAGLLSGYPFQCLGFTPEHQRDFIARDLGPTLANSTHHRVRLLMLDDQRLLLPHWAKVVLTDPEAAKYVHGIAVHWYLDFLAPAKATLGETHRLFPNTMLFASEACVGSKFWEQSVRLGSWDRGMQYSHSIITNLLYHVVGWTDWNLALNPEGGPNWVRNFVDSPIIVDITKDTFYKQPMFYHLGHFSKFIPEGSQRVGLVASQKNDLDAVALLHPDGSAVVVVLNRSSKDVPLTIKDPAVGFLETISPGYSIHTYLWRRQ

SEQ ID NO: 731 - DNA, 1614 bp, synthetic construct
  misc_feature 1..1614: note = Variant of B-Glucocerebrosidase
  source 1..1614: mol_type = other DNA
atggagttttcttctcctagtagagaagaatgccccaagccactgagcagggtgagcatcatggctggatccctcacagggctgcttcttttgcaggcagtctcatgggcctctggagccaggccctgtattcccaagtcattcggctactcctcagtggtgtgtgtatgcaatgccacctattgtgacagtttcgatcctccaactctccctgctctgggtaccttctcccggtatgagagcacaagaagtggaagacgcatggagctctcaatgggccctatacaggctaaccacactgggacaggtctgctgctgaccctccaacctgaacagaagtttcagaaagtcaagggatttggaggagccatgactgatgcagcagcactcaacatcttggccctgtctccaccagcccagaatctgctgttgaagtcctacttctcagaggaggggattggctacaacatcatccgggttcccatggctagctgtgacttctccattaggacctatacatacgctgacacccccgatgattttcagctccataatttcagtctccctgaagaagacaccaaactgaagatacctctgattcacagagccttgcaactgtcccaaaggccagtgagcctcttcgcttctccctggactagtcctacatggctgaagactaatggtgctgttaatgggaaaggctccctgaaaggacagccaggtgacatatatcatcagacatgggcccgctactttgtgaaattccttgatgcctatgcagagcacaagctccaattctgggcagtcaccgcagaaaacgagccctcagctgggctgctgtctggctacccctttcagtgcttgggctttactcctgagcatcaacgggacttcattgcccgggatttggggccaacactggccaacagcacccaccacaatgtaagactcctcatgctggatgaccagaggctgctgctccctcattgggccaaggtggtgttgggggacccagaagctgccaaatatgttcatggcatcgctgtccactggtacctggattttttggcccctgcaaaggctactctgggagagacccacagactcttccccaataccatgctgtttgcatcagaagcctgcgtggggagcaaattctgggagcagtctgttaggctgggttcctgggatcggggcatgcaatattcccatagtataataactaacctcctctaccacgtggtaggatggacagactggaatctggctttgaacccagaaggaggccccaattgggtgcgcaactttgttgacagccccatcattgtggatatcacaaaggacaccttctacaaacagcctatgttctatcatctggggcactttagcaagttcattccagagggttcccagagagtaggcttggttgcctcacagaagaatgatctggatgctgtggcactcctgcatcctgacgggagtgcagtggtggtagtactgaacaggtctagcaaagatgttcccttgactatcaaagacccagctgtgggctttctggaaaccatttcccctggatactctatccacacctatctctggagaagacagtaatga

SEQ ID NO: 732 - protein, 536 aa, synthetic construct
  REGION 1..536: note = Variant of B-Glucocerebrosidase
MEFSSPSREECPKPLSRVSIMAGSLTGLLLLQAVSWASGARPCIPKSFGYSSVVCVCNATYCDSFDPPTLPALGTFSRYESTRSGRRMELSMGPIQANHTGTGLLLTLQPEQKFQKVKGFGGAMTDAAALNILALSPPAQNLLLKSYFSEEGIGYNIIRVPMASCDFSIRTYTYADTPDDFQLHNFSLPEEDTKLKIPLIHRALQLSQRPVSLFASPWTSPTWLKTNGAVNGKGSLKGQPGDIYHQTWARYFVKFLDAYAEHKLQFWAVTAENEPSAGLLSGYPFQCLGFTPEHQRDFIARDLGPTLANSTHHNVRLLMLDDQRLLLPHWAKVVLGDPEAAKYVHGIAVHWYLDFLAPAKATLGETHRLFPNTMLFASEACVGSKFWEQSVRLGSWDRGMQYSHSIITNLLYHVVGWTDWNLALNPEGGPNWVRNFVDSPIIVDITKDTFYKQPMFYHLGHFSKFIPEGSQRVGLVASQKNDLDAVALLHPDGSAVVVVLNRSSKDVPLTIKDPAVGFLETISPGYSIHTYLWRRQ

SEQ ID NO: 733 - DNA, 1614 bp, synthetic construct
  misc_feature 1..1614: note = Variant of B-Glucocerebrosidase
  source 1..1614: mol_type = other DNA
atggagttttcttctcctagtagagaagaatgccccaagccactgagcagggtgagcatcatggctggatccctcacagggctgcttcttttgcaggcagtctcatgggcctctggagccaggccctgtattcccaagtcattcggctactcctcagtggtgtgtgtatgcaatgccacctattgtgacagtttcgatcctccaactctccctgctctgggtaccttctcccggtatgagagcacaagaagtggaagacgcatggagctctcaatgggcccaatacaggctaaccacactggggagggtctgctgctgaccctccaacctgaacagaagtttcagaaagtcaagggatttggaggagccatgactgatgcagcagcactcaacatcttggccctgtctccaccagcccagaatctgctgttgaagtcctacttctcagaggaggggattggctacaacatcatccgggttcccatggctagctgtgacttctccattaggacctatacatacgctgacacccccgatgattttcagctccataatttcagtctccctgaagaagacaccaaactgaagatacctctgattcacagagccttgcaactgtcccaaaggccagtgagcctcttcgcttctccctggactagtcctacatggctgaagactaatggtgctgttaatgggaaaggctccctgaaaggacagccaggtgacatatatcatcagacatgggcccgctactttgtgaaattccttgatgcctatgcagagcacaagctccaattctgggcagtcaccgcagaaaacgagccctcagctgggctgctgtctggctacccctttcagtgcttgggctttactcctgagcatcaacgggacttcattgcccgggatttggggccaacactggccaacagcacccaccacaatgtaagactcctcatgctggatgaccagaggctgctgctccctcattgggccaaggtggtgttgacagacccagaagctgccaaatatgttcatggcatcgctgtccactggtacctggattttttggcccctgcaaaggctactctgggagagacccacagactcttccccaataccatgctgtttgcatcagaagcctgcgtggggagcaaattctgggagcagtctgttaggctgggttcctgggatcggggcatgcaatattcccatagtataataactaacctcctctaccacgtggtaggatggacagactggaatctggctttgaacccagaaggaggccccaattgggtgcgcaactttgttgacagccccatcattgtggatatcacaaaggacaccttctacaaacagcctatgttctatcatctggggcactttagcaagttcattccagagggttcccagagagtaggcttggttgcctcacagaagaatgatctggatgctgtggcactcctgcatcctgacgggagtgcagtggtggtagtactgaacaggtctagcaaagatgttcccttgactatcaaagacccagctgtgggctttctggaaaccatttcccctggatactctatccacacctatctctggagaagacagtaatga

SEQ ID NO: 734 - protein, 536 aa, synthetic construct
  REGION 1..536: note = Variant of B-Glucocerebrosidase
MEFSSPSREECPKPLSRVSIMAGSLTGLLLLQAVSWASGARPCIPKSFGYSSVVCVCNATYCDSFDPPTLPALGTFSRYESTRSGRRMELSMGPIQANHTGEGLLLTLQPEQKFQKVKGFGGAMTDAAALNILALSPPAQNLLLKSYFSEEGIGYNIIRVPMASCDFSIRTYTYADTPDDFQLHNFSLPEEDTKLKIPLIHRALQLSQRPVSLFASPWTSPTWLKTNGAVNGKGSLKGQPGDIYHQTWARYFVKFLDAYAEHKLQFWAVTAENEPSAGLLSGYPFQCLGFTPEHQRDFIARDLGPTLANSTHHNVRLLMLDDQRLLLPHWAKVVLTDPEAAKYVHGIAVHWYLDFLAPAKATLGETHRLFPNTMLFASEACVGSKFWEQSVRLGSWDRGMQYSHSIITNLLYHVVGWTDWNLALNPEGGPNWVRNFVDSPIIVDITKDTFYKQPMFYHLGHFSKFIPEGSQRVGLVASQKNDLDAVALLHPDGSAVVVVLNRSSKDVPLTIKDPAVGFLETISPGYSIHTYLWRRQ

SEQ ID NO: 735 - DNA, 1614 bp, synthetic construct
  misc_feature 1..1614: note = Variant of B-Glucocerebrosidase
  source 1..1614: mol_type = other DNA
atggagttttcttctcctagtagagaagaatgccccaagccactgagcagggtgagcatcatggctggatccctcacagggctgcttcttttgcaggcagtctcatgggcctctggagccaggccctgtattcccaagtcattcggctactcctcagtggtgtgtgtatgcaatgccacctattgtgacagtttcgatcctccaactctccctgctctgggtaccttctcccggtatgagagcacaagaagtggaagacgcatggagctctcaatgggccctatacaggctaaccacactgggacaggtctgctgctgaccctccaacctgaacagaagtttcagaaagtcaagggatttggaggagccatgactgatgcagcagcactcaacatcttggccctgtctccaccagcccagaatctgctgttgaagtcctacttctcagaggaggggattggctacaacatcatccgggttcccatggctagctgtgacttctccattaggacctatacatacgctgacacccccgatgattttcagctccataatttcagtctccctgaagaagacaccaaactgaagatacctctgattcacagagccttgcaactgtcccaaaggccagtgagcctcttcgcttctccctggactagtcctacatggctgaagactaatggtgctgttaatgggaaaggctccctgaaaggacagccaggtgacatatatcatcagacatgggcccgctactttgtgaaattccttgatgcctatgcagagcacaagctccaattctgggcagtcaccgcagaaaacgagccctcagctgggctgctgtctggctacccctttcagtgcttgggctttactcctgagcatcaacgggacttcattgcccgggatttggggccaacactggccaacagcacccaccacaatgtaagactcctcatgctggatgaccagaggctgctgctccctcattgggccaaggtggtgttgacagacagggaagctgccaaatatgttcatggcatcgctgtccactggtacctggattttttggcccctgcaaaggctactctgggagagacccacagactcttccccaataccatgctgtttgcatcagaagcctgcgtggggagcaaattctgggagcagtctgttaggctgggttcctgggatcggggcatgcaatattcccatagtataataactaacctcctctaccacgtggtaggatggacagactggaatctggctttgaacccagaaggaggccccaattgggtgcgcaactttgttgacagccccatcattgtggatatcacaaaggacaccttctacaaacagcctatgttctatcatctggggcactttagcaagttcattccagagggttcccagagagtaggcttggttgcctcacagaagaatgatctggatgctgtggcactcctgcatcctgacgggagtgcagtggtggtagtactgaacaggtctagcaaagatgttcccttgactatcaaagacccagctgtgggctttctggaaaccatttcccctggatactctatccacacctatctctggagaagacagtaatga

SEQ ID NO: 736 - protein, 536 aa, synthetic construct
  REGION 1..536: note = Variant of B-Glucocerebrosidase
MEFSSPSREECPKPLSRVSIMAGSLTGLLLLQAVSWASGARPCIPKSFGYSSVVCVCNATYCDSFDPPTLPALGTFSRYESTRSGRRMELSMGPIQANHTGTGLLLTLQPEQKFQKVKGFGGAMTDAAALNILALSPPAQNLLLKSYFSEEGIGYNIIRVPMASCDFSIRTYTYADTPDDFQLHNFSLPEEDTKLKIPLIHRALQLSQRPVSLFASPWTSPTWLKTNGAVNGKGSLKGQPGDIYHQTWARYFVKFLDAYAEHKLQFWAVTAENEPSAGLLSGYPFQCLGFTPEHQRDFIARDLGPTLANSTHHNVRLLMLDDQRLLLPHWAKVVLTDREAAKYVHGIAVHWYLDFLAPAKATLGETHRLFPNTMLFASEACVGSKFWEQSVRLGSWDRGMQYSHSIITNLLYHVVGWTDWNLALNPEGGPNWVRNFVDSPIIVDITKDTFYKQPMFYHLGHFSKFIPEGSQRVGLVASQKNDLDAVALLHPDGSAVVVVLNRSSKDVPLTIKDPAVGFLETISPGYSIHTYLWRRQ

SEQ ID NO: 737 - DNA, 1614 bp, synthetic construct
  misc_feature 1..1614: note = Variant of B-Glucocerebrosidase
  source 1..1614: mol_type = other DNA
atggagttttcttctcctagtagagaagaatgccccaagccactgagcagggtgagcatcatggctggatccctcacagggctgcttcttttgcaggcagtctcatgggcctctggagccaggccctgtattcccaagtcattcggctactcctcagtggtgtgtgtatgcaatgccacctattgtgacagtttcgatcctccaactctccctgctctgggtaccttctcccggtatgagagcacaagaagtggaagacgcatggagctctcaatgggccctatacaggctaaccacactgggacaggtctgctgctgaccctccaacctgaacagaagtttcagaaagtcaagggatttggaggagccatgactgatgcagcagcactcaacatcttggccctgtctccaccagcccagaatctgctgttgaagtcctacttctcagaggaggggattggctacaacatcatccgggttcccatggctagctgtgacttctccattaggacctatacatacgctgacacccccgatgattttcagctccataatttcagtctccctgaagaagacaccaaactgaagatacctctgattcacagagccttgcaactgtcccaaaggccagtgagcctcttcgcttctccctggactagtcctacatggctgaagactaatggtgctgttaatgggaaaggctccctgaaaggacagccaggtgacatatatcatcagacatgggcccgctactttgtgaaattccttgatgcctatgcagagcacaagctccaattctgggcagtcaccgcagaaaacgagccctcagctgggctgctgtctggctacccctttcagtgcttgggctttactcctgagcatcaacgggacttcattgcccgggatttggggccaacactggccaacagcacccaccacaatgtaagactcctcatgctggatgaccagaggctgctgctccctcattgggccaaggtggtgttgacagacccagaagctgccaaatatgttcatggcatcgctgtccactggtacctggattttttggcccctgcaaaggctactctgggagagacccacagactcttccccaataccatgctgtttgcatcagaagcctgcgtggggagcaaattctgggagcagtctgttaggctgggttcctgggatcggggcatgcaatattcccatagtataataactaacctcctctaccacgtggtaggatggacagactggaatctggctttgaacccagaaggaggccccaattgggtgcgcaactttgttgacagccccatcattgtggatatcacaaaggacaccttctacaaacagcctatgttctatcatctggggcactttagcaagttcattccagagggttcccagagagtaggcttggttgcctcacagaagaatgatctggatgctgtggcactcctgcatcctgacgggagtgcagtggtggtagtactgaacaggtctagccttgatgttcccttgactatcaaagacccagctgtgggctttctggaaaccatttcccctggatactctatccacacctatctctggagaagacagtaatga

SEQ ID NO: 738 - protein, 536 aa, synthetic construct
  REGION 1..536: note = Variant of B-Glucocerebrosidase
MEFSSPSREECPKPLSRVSIMAGSLTGLLLLQAVSWASGARPCIPKSFGYSSVVCVCNATYCDSFDPPTLPALGTFSRYESTRSGRRMELSMGPIQANHTGTGLLLTLQPEQKFQKVKGFGGAMTDAAALNILALSPPAQNLLLKSYFSEEGIGYNIIRVPMASCDFSIRTYTYADTPDDFQLHNFSLPEEDTKLKIPLIHRALQLSQRPVSLFASPWTSPTWLKTNGAVNGKGSLKGQPGDIYHQTWARYFVKFLDAYAEHKLQFWAVTAENEPSAGLLSGYPFQCLGFTPEHQRDFIARDLGPTLANSTHHNVRLLMLDDQRLLLPHWAKVVLTDPEAAKYVHGIAVHWYLDFLAPAKATLGETHRLFPNTMLFASEACVGSKFWEQSVRLGSWDRGMQYSHSIITNLLYHVVGWTDWNLALNPEGGPNWVRNFVDSPIIVDITKDTFYKQPMFYHLGHFSKFIPEGSQRVGLVASQKNDLDAVALLHPDGSAVVVVLNRSSLDVPLTIKDPAVGFLETISPGYSIHTYLWRRQ

SEQ ID NO: 739 - DNA, 1614 bp, synthetic construct
  misc_feature 1..1614: note = Variant of B-Glucocerebrosidase
  source 1..1614: mol_type = other DNA
atggagttttcttctcctagtagagaagaatgccccaagccactgagcagggtgagcatcatggctggatccctcacagggctgcttcttttgcaggcagtctcatgggcctctggagccaggccctgtattcccaagtcattcggctactcctcagtggtgtgtgtatgcaatgccacctattgtgacagtttcgatcctccaactctccctgctctgggtaccttctcccggtatgagagcacaagaagtggaagacgcatggagctctcaatgggcccaatacaggctaacttgactgggacaggtctgctgctgaccctccaacctgaacagaagtttcagaaagtcaagggatttggaggagccatgactgatgcagcagcactcaacatcttggccctgtctccaccagcccagaatctgctgttgaagtcctacttctcagaggaggggattggctacaacatcatccgggttcccatggctagctgtgacttctccattaggacctatacatacgctgacacccccgatgattttcagctccataatttcagtctccctgaagaagacaccaaactgaagatacctctgattcacagagccttgcaactgtcccaaaggccagtgagcctcttcgcttctccctggactagtcctacatggctgaagactaatggtgctgttaatgggaaaggctccctgaaaggacagccaggtgacatatatcatcagacatgggcccgctactttgtgaaattccttgatgcctatgcagagcacaagctccaattctgggcagtcaccgcagaaaacgagccctcagctgggctgctgtctggctacccctttcagtgcttgggctttactcctgagcatcaacgggacttcattgcccgggatttggggccaacactggccaacagcacccaccacaatgtaagactcctcatgctggatgaccagaggctgctgctccctcattgggccaaggtggtgttgacagacccagaagctgccaaatatgttcatggcatcgctgtccactggtacctggattttttggcccctgcaaaggctactctgggagagacccacagactcttccccaataccatgctgtttgcatcagaagcctgcgtggggagcaaattctgggagcagtctgttaggctgggttcctgggatcggggcatgcaatattcccatagtataataactaacctcctctaccacgtggtaggatggacagactggaatctggctttgaacccagaaggaggccccaattgggtgcgcaactttgttgacagccccatcattgtggatatcacaaaggacaccttctacaaacagcctatgttctatcatctggggcactttagcaagttcattccagagggttcccagagagtaggcttggttgcctcacagaagaatgatctggatgctgtggcactcctgcatcctgacgggagtgcagtggtggtagtactgaacaggtctagcaaagatgttcccttgactatcaaagacccagctgtgggctttctggaaaccatttcccctggatactctatccacacctatctctggagaagacagtaatga

SEQ ID NO: 740 - protein, 536 aa, synthetic construct
  REGION 1..536: note = Variant of B-Glucocerebrosidase
MEFSSPSREECPKPLSRVSIMAGSLTGLLLLQAVSWASGARPCIPKSFGYSSVVCVCNATYCDSFDPPTLPALGTFSRYESTRSGRRMELSMGPIQANLTGTGLLLTLQPEQKFQKVKGFGGAMTDAAALNILALSPPAQNLLLKSYFSEEGIGYNIIRVPMASCDFSIRTYTYADTPDDFQLHNFSLPEEDTKLKIPLIHRALQLSQRPVSLFASPWTSPTWLKTNGAVNGKGSLKGQPGDIYHQTWARYFVKFLDAYAEHKLQFWAVTAENEPSAGLLSGYPFQCLGFTPEHQRDFIARDLGPTLANSTHHNVRLLMLDDQRLLLPHWAKVVLTDPEAAKYVHGIAVHWYLDFLAPAKATLGETHRLFPNTMLFASEACVGSKFWEQSVRLGSWDRGMQYSHSIITNLLYHVVGWTDWNLALNPEGGPNWVRNFVDSPIIVDITKDTFYKQPMFYHLGHFSKFIPEGSQRVGLVASQKNDLDAVALLHPDGSAVVVVLNRSSKDVPLTIKDPAVGFLETISPGYSIHTYLWRRQ

SEQ ID NO: 741 - DNA, 1614 bp, synthetic construct
  misc_feature 1..1614: note = Variant of B-Glucocerebrosidase
  source 1..1614: mol_type = other DNA
atggagttttcttctcctagtagagaagaatgccccaagccactgagcagggtgagcatcatggctggatccctcacagggctgcttcttttgcaggcagtctcatgggcctctggagccaggccctgtattcccaagtcattcggctactcctcagtggtgtgtgtatgcaatgccacctattgtgacagtttcgatcctccaactctccctgctctgggtaccttctcccggtatgagagcacaagaagtggaagacgcatggagctctcaatgggcccaatatctgctaaccacactgggacaggtctgctgctgaccctccaacctgaacagaagtttcagaaagtcaagggatttggaggagccatgactgatgcagcagcactcaacatcttggccctgtctccaccagcccagaatctgctgttgaagtcctacttctcagaggaggggattggctacaacatcatccgggttcccatggctagctgtgacttctccattaggacctatacatacgctgacacccccgatgattttcagctccataatttcagtctccctgaagaagacaccaaactgaagatacctctgattcacagagccttgcaactgtcccaaaggccagtgagcctcttcgcttctccctggactagtcctacatggctgaagactaatggtgctgttaatgggaaaggctccctgaaaggacagccaggtgacatatatcatcagacatgggcccgctactttgtgaaattccttgatgcctatgcagagcacaagctccaattctgggcagtcaccgcagaaaacgagccctcagctgggctgctgtctggctacccctttcagtgcttgggctttactcctgagcatcaacgggacttcattgcccgggatttggggccaacactggccaacagcacccaccacaatgtaagactcctcatgctggatgaccagaggctgctgctccctcattgggccaaggtggtgttgacagacccagaagctgccaaatatgttcatggcatcgctgtccactggtacctggattttttggcccctgcaaaggctactctgggagagacccacagactcttccccaataccatgctgtttgcatcagaagcctgcgtggggagcaaattctgggagcagtctgttaggctgggttcctgggatcggggcatgcaatattcccatagtataataactaacctcctctaccacgtggtaggatggacagactggaatctggctttgaacccagaaggaggccccaattgggtgcgcaactttgttgacagccccatcattgtggatatcacaaaggacaccttctacaaacagcctatgttctatcatctggggcactttagcaagttcattccagagggttcccagagagtaggcttggttgcctcacagaagaatgatctggatgctgtggcactcctgcatcctgacgggagtgcagtggtggtagtactgaacaggtctagcaaagatgttcccttgactatcaaagacccagctgtgggctttctggaaaccatttcccctggatactctatccacacctatctctggagaagacagtaatga

SEQ ID NO: 742 - protein, 536 aa, synthetic construct
  REGION 1..536: note = Variant of B-Glucocerebrosidase
MEFSSPSREECPKPLSRVSIMAGSLTGLLLLQAVSWASGARPCIPKSFGYSSVVCVCNATYCDSFDPPTLPALGTFSRYESTRSGRRMELSMGPISANHTGTGLLLTLQPEQKFQKVKGFGGAMTDAAALNILALSPPAQNLLLKSYFSEEGIGYNIIRVPMASCDFSIRTYTYADTPDDFQLHNFSLPEEDTKLKIPLIHRALQLSQRPVSLFASPWTSPTWLKTNGAVNGKGSLKGQPGDIYHQTWARYFVKFLDAYAEHKLQFWAVTAENEPSAGLLSGYPFQCLGFTPEHQRDFIARDLGPTLANSTHHNVRLLMLDDQRLLLPHWAKVVLTDPEAAKYVHGIAVHWYLDFLAPAKATLGETHRLFPNTMLFASEACVGSKFWEQSVRLGSWDRGMQYSHSIITNLLYHVVGWTDWNLALNPEGGPNWVRNFVDSPIIVDITKDTFYKQPMFYHLGHFSKFIPEGSQRVGLVASQKNDLDAVALLHPDGSAVVVVLNRSSKDVPLTIKDPAVGFLETISPGYSIHTYLWRRQ

SEQ ID NO: 743 - DNA, 1614 bp, synthetic construct
  misc_feature 1..1614: note = Variant of B-Glucocerebrosidase
  source 1..1614: mol_type = other DNA
atggagttttcttctcctagtagagaagaatgccccaagccactgagcagggtgagcatcatggctggatccctcacagggctgcttcttttgcaggcagtctcatgggcctctggagccaggccctgtattcccaagtcattcggctactcctcagtggtgtgtgtatgcaatgccacctattgtgacagtttcgatcctccaactctccctgctctgggtaccttctcccggtatgagagcacaagaagtggaagacgcatggagctctcaatgggccctatacaggctaaccacactgggacaggtctgctgctgaccctccaacctgaacagaagtttcagaaagtcaagggatttggaggagccatgactgatgcagcagcactcaacatcttggccctgtctccatcggcccagaatctgctgttgaagtcctacttctcagaggaggggattggctacaacatcatccgggttcccatggctagctgtgacttctccattaggacctatacatacgctgacacccccgatgattttcagctccataatttcagtctccctgaagaagacaccaaactgaagatacctctgattcacagagccttgcaactgtcccaaaggccagtgagcctcttcgcttctccctggactagtcctacatggctgaagactaatggtgctgttaatgggaaaggctccctgaaaggacagccaggtgacatatatcatcagacatgggcccgctactttgtgaaattccttgatgcctatgcagagcacaagctccaattctgggcagtcaccgcagaaaacgagccctcagctgggctgctgtctggctacccctttcagtgcttgggctttactcctgagcatcaacgggacttcattgcccgggatttggggccaacactggccaacagcacccaccacaatgtaagactcctcatgctggatgaccagaggctgctgctccctcattgggccaaggtggtgttgacagacccagaagctgccaaatatgttcatggcatcgctgtccactggtacctggattttttggcccctgcaaaggctactctgggagagacccacagactcttccccaataccatgctgtttgcatcagaagcctgcgtggggagcaaattctgggagcagtctgttaggctgggttcctgggatcggggcatgcaatattcccatagtataataactaacctcctctaccacgtggtaggatggacagactggaatctggctttgaacccagaaggaggccccaattgggtgcgcaactttgttgacagccccatcattgtggatatcacaaaggacaccttctacaaacagcctatgttctatcatctggggcactttagcaagttcattccagagggttcccagagagtaggcttggttgcctcacagaagaatgatctggatgctgtggcactcctgcatcctgacgggagtgcagtggtggtagtactgaacaggtctagcaaagatgttcccttgactatcaaagacccagctgtgggctttctggaaaccatttcccctggatactctatccacacctatctctggagaagacagtaatga

SEQ ID NO: 744 - protein, 536 aa, synthetic construct
  REGION 1..536: note = Variant of B-Glucocerebrosidase
MEFSSPSREECPKPLSRVSIMAGSLTGLLLLQAVSWASGARPCIPKSFGYSSVVCVCNATYCDSFDPPTLPALGTFSRYESTRSGRRMELSMGPIQANHTGTGLLLTLQPEQKFQKVKGFGGAMTDAAALNILALSPSAQNLLLKSYFSEEGIGYNIIRVPMASCDFSIRTYTYADTPDDFQLHNFSLPEEDTKLKIPLIHRALQLSQRPVSLFASPWTSPTWLKTNGAVNGKGSLKGQPGDIYHQTWARYFVKFLDAYAEHKLQFWAVTAENEPSAGLLSGYPFQCLGFTPEHQRDFIARDLGPTLANSTHHNVRLLMLDDQRLLLPHWAKVVLTDPEAAKYVHGIAVHWYLDFLAPAKATLGETHRLFPNTMLFASEACVGSKFWEQSVRLGSWDRGMQYSHSIITNLLYHVVGWTDWNLALNPEGGPNWVRNFVDSPIIVDITKDTFYKQPMFYHLGHFSKFIPEGSQRVGLVASQKNDLDAVALLHPDGSAVVVVLNRSSKDVPLTIKDPAVGFLETISPGYSIHTYLWRRQ

SEQ ID NO: 745 - DNA, 1614 bp, synthetic construct
  misc_feature 1..1614: note = Variant of B-Glucocerebrosidase
  source 1..1614: mol_type = other DNA
atggagttttcttctcctagtagagaagaatgccccaagccactgagcagggtgagcatcatggctggatccctcacagggctgcttcttttgcaggcagtctcatgggcctctggagccaggccctgtattcccaagtcattcggctactcctcagtggtgtgtgtatgcaatgccacctattgtgacagtttcgatcctccaactctccctgctctgggtaccttctcccggtatgagagcacaagaagtggaagacgcatggagctctcaatgggccctatacaggctaaccacactgggacaggtctgctgctgaccctccaacctgaacagaagtttcagaaagtcaagggatttggaggagccatgactgatgcagcagcactcaacatcttggccctgtctccaccagcccagaatctgctgttgaagtcctacttctcagaggaggggattggctacaacatcatccgggttcccatggctagctgtgacttctccattaggacctatacatacgctgacacccccgatgattttcagctccataatttcagtctccctgaagaagacaccaaactgaagatacctctgattcacagagccttgcaactgtcccaaaggccagtgagcctcttcgcttctccctggactagtcctacatggctgaagactaatggtgctgttaatgggaaaggctccctgaaaggacagccaggtgacatatatcatcagacatgggcccgctactttgtgaaattccttgatgcctatgcagagcacaagctccaattctgggcagtcaccgcagaaaacgagccctcagctgggctgctgtctggctacccctttcagtgcttgggctttactcctgagcatcaacgggacttcattgcccgggatttggggccaacactggccaacagcacccaccacaatgtaagactcctcatgctggatgaccagaggctgctgctccctcattgggccaaggtggtgttgacagacccagaagctgccaaatatgttcatggcatcgctgtccactggtacctggattttttggcccctgcaaaggctactctgggagagacccacagactcttccccaataccatgctgtttgcatcagaagcctgcgtggggagcaaattctgggagcagtctgttaggctgggttcctgggatcggggcatgcaatattcccatagtataataactaacctcctctaccacgtggtaggatggacagactggaatctggctttgaacccagaaggaggccccaattgggtgcgcaactttgttgacagccccatcattgtggatatcacaaaggacaccttctacaaacagcctatgttctatcatctggggcactttagcaagttcattccagagggttcccagagagtaggcttggttgcctcacagaagaatgatctggatgctgtggcactcctgcatcctgacgggagtgcagtggtggtagtactgaacaggtctagcaaagatgttacgttgactatcaaagacccagctgtgggctttctggaaaccatttcccctggatactctatccacacctatctctggagaagacagtaatga

SEQ ID NO: 746 - protein, 536 aa, synthetic construct
  REGION 1..536: note = Variant of B-Glucocerebrosidase
MEFSSPSREECPKPLSRVSIMAGSLTGLLLLQAVSWASGARPCIPKSFGYSSVVCVCNATYCDSFDPPTLPALGTFSRYESTRSGRRMELSMGPIQANHTGTGLLLTLQPEQKFQKVKGFGGAMTDAAALNILALSPPAQNLLLKSYFSEEGIGYNIIRVPMASCDFSIRTYTYADTPDDFQLHNFSLPEEDTKLKIPLIHRALQLSQRPVSLFASPWTSPTWLKTNGAVNGKGSLKGQPGDIYHQTWARYFVKFLDAYAEHKLQFWAVTAENEPSAGLLSGYPFQCLGFTPEHQRDFIARDLGPTLANSTHHNVRLLMLDDQRLLLPHWAKVVLTDPEAAKYVHGIAVHWYLDFLAPAKATLGETHRLFPNTMLFASEACVGSKFWEQSVRLGSWDRGMQYSHSIITNLLYHVVGWTDWNLALNPEGGPNWVRNFVDSPIIVDITKDTFYKQPMFYHLGHFSKFIPEGSQRVGLVASQKNDLDAVALLHPDGSAVVVVLNRSSKDVTLTIKDPAVGFLETISPGYSIHTYLWRRQ

SEQ ID NO: 747 - DNA, 1614 bp, synthetic construct
  misc_feature 1..1614: note = Variant of B-Glucocerebrosidase
  source 1..1614: mol_type = other DNA
atggagttttcttctcctagtagagaagaatgccccaagccactgagcagggtgagcatcatggctggatccctcacagggctgcttcttttgcaggcagtctcatgggcctctggagccaggccctgtattcccaagtcattcggctactcctcagtggtgtgtgtatgcaatgccacctattgtgacagtttcgatcctccaactctccctgctctgggtaccttctcccggtatgagagcacaagaagtggaagacgcatggagctctcaatgggcccaataattgctaaccacactgggacaggtctgctgctgaccctccaacctgaacagaagtttcagaaagtcaagggatttggaggagccatgactgatgcagcagcactcaacatcttggccctgtctccaccagcccagaatctgctgttgaagtcctacttctcagaggaggggattggctacaacatcatccgggttcccatggctagctgtgacttctccattaggacctatacatacgctgacacccccgatgattttcagctccataatttcagtctccctgaagaagacaccaaactgaagatacctctgattcacagagccttgcaactgtcccaaaggccagtgagcctcttcgcttctccctggactagtcctacatggctgaagactaatggtgctgttaatgggaaaggctccctgaaaggacagccaggtgacatatatcatcagacatgggcccgctactttgtgaaattccttgatgcctatgcagagcacaagctccaattctgggcagtcaccgcagaaaacgagccctcagctgggctgctgtctggctacccctttcagtgcttgggctttactcctgagcatcaacgggacttcattgcccgggatttggggccaacactggccaacagcacccaccacaatgtaagactcctcatgctggatgaccagaggctgctgctccctcattgggccaaggtggtgttgacagacccagaagctgccaaatatgttcatggcatcgctgtccactggtacctggattttttggcccctgcaaaggctactctgggagagacccacagactcttccccaataccatgctgtttgcatcagaagcctgcgtggggagcaaattctgggagcagtctgttaggctgggttcctgggatcggggcatgcaatattcccatagtataataactaacctcctctaccacgtggtaggatggacagactggaatctggctttgaacccagaaggaggccccaattgggtgcgcaactttgttgacagccccatcattgtggatatcacaaaggacaccttctacaaacagcctatgttctatcatctggggcactttagcaagttcattccagagggttcccagagagtaggcttggttgcctcacagaagaatgatctggatgctgtggcactcctgcatcctgacgggagtgcagtggtggtagtactgaacaggtctagcaaagatgttcccttgactatcaaagacccagctgtgggctttctggaaaccatttcccctggatactctatccacacctatctctggagaagacagtaatga

SEQ ID NO: 748 - protein, 536 aa, synthetic construct
  REGION 1..536: note = Variant of B-Glucocerebrosidase
MEFSSPSREECPKPLSRVSIMAGSLTGLLLLQAVSWASGARPCIPKSFGYSSVVCVCNATYCDSFDPPTLPALGTFSRYESTRSGRRMELSMGPIIANHTGTGLLLTLQPEQKFQKVKGFGGAMTDAAALNILALSPPAQNLLLKSYFSEEGIGYNIIRVPMASCDFSIRTYTYADTPDDFQLHNFSLPEEDTKLKIPLIHRALQLSQRPVSLFASPWTSPTWLKTNGAVNGKGSLKGQPGDIYHQTWARYFVKFLDAYAEHKLQFWAVTAENEPSAGLLSGYPFQCLGFTPEHQRDFIARDLGPTLANSTHHNVRLLMLDDQRLLLPHWAKVVLTDPEAAKYVHGIAVHWYLDFLAPAKATLGETHRLFPNTMLFASEACVGSKFWEQSVRLGSWDRGMQYSHSIITNLLYHVVGWTDWNLALNPEGGPNWVRNFVDSPIIVDITKDTFYKQPMFYHLGHFSKFIPEGSQRVGLVASQKNDLDAVALLHPDGSAVVVVLNRSSKDVPLTIKDPAVGFLETISPGYSIHTYLWRRQ

SEQ ID NO: 749 - DNA, 1614 bp, synthetic construct
  misc_feature 1..1614: note = Variant of B-Glucocerebrosidase
  source 1..1614: mol_type = other DNA
atggagttttcttctcctagtagagaagaatgccccaagccactgagcagggtgagcatcatggctggatccctcacagggctgcttcttttgcaggcagtctcatgggcctctggagccaggccctgtattcccaagtcattcggctactcctcagtggtgtgtgtatgcaatgccacctattgtgacagtttcgatcctccaactctccctgctctgggtaccttctcccggtatgagagcacaagaagtggaagacgcatggagctctcaatgggccctatacaggctaaccacactgggacaggtctgctgctgaccctccaacctgaacagaagtttcagaaagtcaagggatttggaggagccatgactgatgcagcagcactcaacatcttggccctgtctccaccagcccagaatctgctgttgaagtcctacttctcagaggaggggattggctacaacatcatccgggttcccatggctagctgtgacttctccattaggacctatacatacgctgacacccccgatgattttcagctccataatttcagtctccctgaagaagacaccaaactgaagatacctctgattcacagagccttgcaactgtcccaaaggccagtgagcctcttcgcttctccctggactagtcctacatggctgaagactaatggtgctgttaatgggaaaggctccctgaaaggacagccaggtgacatatatcatcagacatgggcccgctactttgtgaaattccttgatgcctatgcagagcacaagctccaattctgggcagtcaccgcagaaaacgagccctcagctgggctgctgtctggctacccctttcagtgcttgggctttactcctgagcatcaacgggacttcattgcccgggatttggggccaacactggccaacagcacccaccacaatgtaagactcctcatgctggatgaccagaggctgctgctccctcattgggccaaggtggtgttgacagacccagaagctgccaaatatgttcatggcatcgctgtccactggtacctggattttttggcccctgcaaaggctactctgggagagacccacagactcttccccaataccatgctgtttgcatcagaagcctgcgtggggagcaaattctgggagcagtctgttaggctgggttcctgggatcggggcatgcaatattcccatagtataataactaacctcctctaccacgtggtaggatggacagactggaatctggctttgaacccagaaggaggccccaattgggtgcgcaactttgttgacagccccatcattgtggatatcacaaaggacaccttctacaaacagcctatgttctatcatctggggcactttagcaagttcattccagagggttcccagagagtaggcttggttgcctcacagaagaatgatctggatgctgtggcactcctgcatcctgacgggagtgcagtggtggtagtactgaacaggtctagcaaagatgttcagttgactatcaaagacccagctgtgggctttctggaaaccatttcccctggatactctatccacacctatctctggagaagacagtaatga

SEQ ID NO: 750 - protein, 536 aa, synthetic construct
  REGION 1..536: note = Variant of B-Glucocerebrosidase
MEFSSPSREECPKPLSRVSIMAGSLTGLLLLQAVSWASGARPCIPKSFGYSSVVCVCNATYCDSFDPPTLPALGTFSRYESTRSGRRMELSMGPIQANHTGTGLLLTLQPEQKFQKVKGFGGAMTDAAALNILALSPPAQNLLLKSYFSEEGIGYNIIRVPMASCDFSIRTYTYADTPDDFQLHNFSLPEEDTKLKIPLIHRALQLSQRPVSLFASPWTSPTWLKTNGAVNGKGSLKGQPGDIYHQTWARYFVKFLDAYAEHKLQFWAVTAENEPSAGLLSGYPFQCLGFTPEHQRDFIARDLGPTLANSTHHNVRLLMLDDQRLLLPHWAKVVLTDPEAAKYVHGIAVHWYLDFLAPAKATLGETHRLFPNTMLFASEACVGSKFWEQSVRLGSWDRGMQYSHSIITNLLYHVVGWTDWNLALNPEGGPNWVRNFVDSPIIVDITKDTFYKQPMFYHLGHFSKFIPEGSQRVGLVASQKNDLDAVALLHPDGSAVVVVLNRSSKDVQLTIKDPAVGFLETISPGYSIHTYLWRRQ

SEQ ID NO: 751 - DNA, 1614 bp, synthetic construct
  misc_feature 1..1614: note = Variant of B-Glucocerebrosidase
  source 1..1614: mol_type = other DNA
atggagttttcttctcctagtagagaagaatgccccaagccactgagcagggtgagcatcatggctggatccctcacagggctgcttcttttgcaggcagtctcatgggcctctggagccaggccctgtattcccaagtcattcggctactcctcagtggtgtgtgtatgcaatgccacctattgtgacagtttcgatcctccaactctccctgctctgggtaccttctcccggtatgagagcacaagaagtggaagacgcatggagctctcaatgggccctatacaggctaaccacactgggacaggtctgctgctgaccctccaacctgaacagaagtttcagaaagtcaagggatttggaggagccatgactgatgcagcagcactcaacatcttggccctgtctccaccagcccagaatctgctgttgaagtcctacttctcagaggaggggattggctacaacatcatccgggttcccatggctagctgtgacttctccattaggacctatacatacgctgacacccccgatgattttcagctccataatttcagtctccctgaagaagacaccaaactgaagatacctctgattcacagagccttgcaactgtcccaaaggccagtgagcctcttcgcttctccctggactagtcctacatggctgaagactaatggtgctgttaatgggaaaggctccctgaaaggacagccaggtgacatgtatcatcagacatgggcccgctactttgtgaaattccttgatgcctatgcagagcacaagctccaattctgggcagtcaccgcagaaaacgagccctcagctgggctgctgtctggctacccctttcagtgcttgggctttactcctgagcatcaacgggacttcattgcccgggatttggggccaacactggccaacagcacccaccacaatgtaagactcctcatgctggatgaccagaggctgctgctccctcattgggccaaggtggtgttgacagacccagaagctgccaaatatgttcatggcatcgctgtccactggtacctggattttttggcccctgcaaaggctactctgggagagacccacagactcttccccaataccatgctgtttgcatcagaagcctgcgtggggagcaaattctgggagcagtctgttaggctgggttcctgggatcggggcatgcaatattcccatagtataataactaacctcctctaccacgtggtaggatggacagactggaatctggctttgaacccagaaggaggccccaattgggtgcgcaactttgttgacagccccatcattgtggatatcacaaaggacaccttctacaaacagcctatgttctatcatctggggcactttagcaagttcattccagagggttcccagagagtaggcttggttgcctcacagaagaatgatctggatgctgtggcactcctgcatcctgacgggagtgcagtggtggtagtactgaacaggtctagcaaagatgttcccttgactatcaaagacccagctgtgggctttctggaaaccatttcccctggatactctatccacacctatctctggagaagacagtaatga

SEQ ID NO: 752 - protein, 536 aa, synthetic construct
  REGION 1..536: note = Variant of B-Glucocerebrosidase
MEFSSPSREECPKPLSRVSIMAGSLTGLLLLQAVSWASGARPCIPKSFGYSSVVCVCNATYCDSFDPPTLPALGTFSRYESTRSGRRMELSMGPIQANHTGTGLLLTLQPEQKFQKVKGFGGAMTDAAALNILALSPPAQNLLLKSYFSEEGIGYNIIRVPMASCDFSIRTYTYADTPDDFQLHNFSLPEEDTKLKIPLIHRALQLSQRPVSLFASPWTSPTWLKTNGAVNGKGSLKGQPGDMYHQTWARYFVKFLDAYAEHKLQFWAVTAENEPSAGLLSGYPFQCLGFTPEHQRDFIARDLGPTLANSTHHNVRLLMLDDQRLLLPHWAKVVLTDPEAAKYVHGIAVHWYLDFLAPAKATLGETHRLFPNTMLFASEACVGSKFWEQSVRLGSWDRGMQYSHSIITNLLYHVVGWTDWNLALNPEGGPNWVRNFVDSPIIVDITKDTFYKQPMFYHLGHFSKFIPEGSQRVGLVASQKNDLDAVALLHPDGSAVVVVLNRSSKDVPLTIKDPAVGFLETISPGYSIHTYLWRRQ

SEQ ID NO: 753 - DNA, 1614 bp, synthetic construct
  misc_feature 1..1614: note = Variant of B-Glucocerebrosidase
  source 1..1614: mol_type = other DNA
atggagttttcttctcctagtagagaagaatgccccaagccactgagcagggtgagcatcatggctggatccctcacagggctgcttcttttgcaggcagtctcatgggcctctggagccaggccctgtattcccaagtcattcggctactcctcagtggtgtgtgtatgcaatgccacctattgtgacagtttcgatcctccaactctccctgctctgggtaccttctcccggtatgagagcacaagaagtggaagacgcatggagctctcaatgggccctatacaggctaaccacactgggacaggtctgctgctgaccctccaacctctgcagaagtttcagaaagtcaagggatttggaggagccatgactgatgcagcagcactcaacatcttggccctgtctccaccagcccagaatctgctgttgaagtcctacttctcagaggaggggattggctacaacatcatccgggttcccatggctagctgtgacttctccattaggacctatacatacgctgacacccccgatgattttcagctccataatttcagtctccctgaagaagacaccaaactgaagatacctctgattcacagagccttgcaactgtcccaaaggccagtgagcctcttcgcttctccctggactagtcctacatggctgaagactaatggtgctgttaatgggaaaggctccctgaaaggacagccaggtgacatatatcatcagacatgggcccgctactttgtgaaattccttgatgcctatgcagagcacaagctccaattctgggcagtcaccgcagaaaacgagccctcagctgggctgctgtctggctacccctttcagtgcttgggctttactcctgagcatcaacgggacttcattgcccgggatttggggccaacactggccaacagcacccaccacaatgtaagactcctcatgctggatgaccagaggctgctgctccctcattgggccaaggtggtgttgacagacccagaagctgccaaatatgttcatggcatcgctgtccactggtacctggattttttggcccctgcaaaggctactctgggagagacccacagactcttccccaataccatgctgtttgcatcagaagcctgcgtggggagcaaattctgggagcagtctgttaggctgggttcctgggatcggggcatgcaatattcccatagtataataactaacctcctctaccacgtggtaggatggacagactggaatctggctttgaacccagaaggaggccccaattgggtgcgcaactttgttgacagccccatcattgtggatatcacaaaggacaccttctacaaacagcctatgttctatcatctggggcactttagcaagttcattccagagggttcccagagagtaggcttggttgcctcacagaagaatgatctggatgctgtggcactcctgcatcctgacgggagtgcagtggtggtagtactgaacaggtctagcaaagatgttcccttgactatcaaagacccagctgtgggctttctggaaaccatttcccctggatactctatccacacctatctctggagaagacagtaatga

SEQ ID NO: 754 - protein, 536 aa, synthetic construct
  REGION 1..536: note = Variant of B-Glucocerebrosidase
MEFSSPSREECPKPLSRVSIMAGSLTGLLLLQAVSWASGARPCIPKSFGYSSVVCVCNATYCDSFDPPTLPALGTFSRYESTRSGRRMELSMGPIQANHTGTGLLLTLQPLQKFQKVKGFGGAMTDAAALNILALSPPAQNLLLKSYFSEEGIGYNIIRVPMASCDFSIRTYTYADTPDDFQLHNFSLPEEDTKLKIPLIHRALQLSQRPVSLFASPWTSPTWLKTNGAVNGKGSLKGQPGDIYHQTWARYFVKFLDAYAEHKLQFWAVTAENEPSAGLLSGYPFQCLGFTPEHQRDFIARDLGPTLANSTHHNVRLLMLDDQRLLLPHWAKVVLTDPEAAKYVHGIAVHWYLDFLAPAKATLGETHRLFPNTMLFASEACVGSKFWEQSVRLGSWDRGMQYSHSIITNLLYHVVGWTDWNLALNPEGGPNWVRNFVDSPIIVDITKDTFYKQPMFYHLGHFSKFIPEGSQRVGLVASQKNDLDAVALLHPDGSAVVVVLNRSSKDVPLTIKDPAVGFLETISPGYSIHTYLWRRQ

SEQ ID NO: 755 - DNA, 1614 bp, synthetic construct
  misc_feature 1..1614: note = Variant of B-Glucocerebrosidase
  source 1..1614: mol_type = other DNA
atggagttttcttctcctagtagagaagaatgccccaagccactgagcagggtgagcatcatggctggatccctcacagggctgcttcttttgcaggcagtctcatgggcctctggagccaggccctgtattcccaagtcattcggctactcctcagtggtgtgtgtatgcaatgccacctattgtgacagtttcgatcctccaactctccctgctctgggtaccttctcccggtatgagagcacaagaagtggaagacgcatggagctctcaatgggccctatacaggctaaccacactgggacaggtctgctgctgaccctccaacctgaacagaagtttcagaaagtcaagggatttggaggagccatgactgatgcagcagcactcaacatcttggccctgtctccaccagcccagaatctgctgttgaagtcctacttctcagaggaggggattggctacaacatcatccgggttcccatggctagctgtgacttctccattaggacctatacatacgctgacacccccgatgattttcagctccataatttcagtctccctgaagaagacaccaaactgaagatacctctgattcacagagccttgcaactgtcccaaaggccagtgagcctcttcgcttctccctggactagtcctacatggctgaagactaatggtgctgttaatgggaaaggctccctgaaaggacagccaggtgacatatatcatcagacatgggcccgctactttgtgaaattccttgatgcctatgcagagcacaagctccaattctgggcagtcaccgcagaaaacgagccctcagctgggctgctgtctggctacccctttcagtgcttgggctttactcctgagcatcaacgggacttcattgcccgggatttggggccaacactggccaacagcacccaccacaatgtaagactcctcatgctggatgaccagaggctgctgctccctcattgggccaaggtggtgttgacagacccagaagctgccaaatatgttcatggcatcgctgtccactggtacctggattttttggcccctgcaaaggctactctgggagagacccacagactcttccccaataccatgctgtttgcatcagaagcctgcgtggggagcaaattctgggagcagtctgttaggctgggttcctgggatcggggcatgcaatattcccatagtataataactaacctcctctaccacgtggtaggatggacagactggaatctggctttgaacccagaaggaggccccaattgggtgcgcaactttgttgacagccccatcattgtggatatcacaaaggacaccttctacaaacagcctatgttctatcatctggggcactttagcaagttcattccagagggttcccagagagtaggcttggttgcctcacagaagaatgatctggatgctgtggcactcctgcatcctgacgggagtgcagtggtggtagtactgaacaggtctagcaaagatgttagtttgactatcaaagacccagctgtgggctttctggaaaccatttcccctggatactctatccacacctatctctggagaagacagtaatga

SEQ ID NO: 756 - protein, 536 aa, synthetic construct
  REGION 1..536: note = Variant of B-Glucocerebrosidase
MEFSSPSREECPKPLSRVSIMAGSLTGLLLLQAVSWASGARPCIPKSFGYSSVVCVCNATYCDSFDPPTLPALGTFSRYESTRSGRRMELSMGPIQANHTGTGLLLTLQPEQKFQKVKGFGGAMTDAAALNILALSPPAQNLLLKSYFSEEGIGYNIIRVPMASCDFSIRTYTYADTPDDFQLHNFSLPEEDTKLKIPLIHRALQLSQRPVSLFASPWTSPTWLKTNGAVNGKGSLKGQPGDIYHQTWARYFVKFLDAYAEHKLQFWAVTAENEPSAGLLSGYPFQCLGFTPEHQRDFIARDLGPTLANSTHHNVRLLMLDDQRLLLPHWAKVVLTDPEAAKYVHGIAVHWYLDFLAPAKATLGETHRLFPNTMLFASEACVGSKFWEQSVRLGSWDRGMQYSHSIITNLLYHVVGWTDWNLALNPEGGPNWVRNFVDSPIIVDITKDTFYKQPMFYHLGHFSKFIPEGSQRVGLVASQKNDLDAVALLHPDGSAVVVVLNRSSKDVSLTIKDPAVGFLETISPGYSIHTYLWRRQ

SEQ ID NO: 757 - DNA, 1614 bp, synthetic construct
  misc_feature 1..1614: note = Variant of B-Glucocerebrosidase
  source 1..1614: mol_type = other DNA
atggagttttcttctcctagtagagaagaatgccccaagccactgagcagggtgagcatcatggctggatccctcacagggctgcttcttttgcaggcagtctcatgggcctctggagccaggccctgtattcccaagtcattcggctactcctcagtggtgtgtgtatgcaatgccacctattgtgacagtttcgatcctccaactctccctgctctgggtaccttctcccggtatgagagcacaagaagtggaagacgcatggagctctcaatgggccctatacaggctaaccacactgggacaggtctgctgctgaccctccaacctgaacagaagtttcagaaagtcaagggatttggaggagccatgactgatgcagcagcactcaacatcttggccctgtctccaccagcccagaatctgctgttgaagtcctacttctcagaggaggggattggctacaacatcatccgggttcccatggctagctgtgacttctccattaggacctatacatacgctgacacccccgatgattttcagctccataatttcagtctccctgaagaagacaccaaactgaagatacctctgattcacagagccttgcaactgtcccaaaggccagtgagcctcttcgcttctccctggactagtcctacatggctgaagactaatggtgctgttaatgggaaaggctccctgaaaggacagccaggtgacatatatcatcagacatgggcccgctactttgtgaaattccttgatgcctatgcagagcacaagctccaattctgggcagtcaccgcagaaaacgagccctcagctgggctgctgtctggctacccctttcagtgcttgggctttactcctgagcatcaacgggacttcattgcccgggatttggggccaacactggccaacagcacccaccacaatgtaagactcctcatgctggatgaccagaggctgctgctccctcattgggccaaggtggtgttgacagacccagaagctgccaaatatgttcatggcatcgctgtccactggtacctggattttttggcccctgcaaaggctactctgggagagacccacagactcttccccaataccatgctgtttgcatcagaagcctgcgtggggagcaaattctgggagcagtctgttaggctgggttcctgggatcggggcatgcaatattcccatagtataataactaacctcctctaccacgtggtaggatggacagactggaatctggctttgaacccagaaggaggccccaattgggtgcgcaactttgttgacagccccatcattgtggatatcacaaaggacaccttctacaaacagcctatgttctatcatctggggcactttagcaagttcattccagagggttcccagagagtaggcttggttgcctcacgtaagaatgatctggatgctgtggcactcctgcatcctgacgggagtgcagtggtggtagtactgaacaggtctagcaaagatgttcccttgactatcaaagacccagctgtgggctttctggaaaccatttcccctggatactctatccacacctatctctggagaagacagtaatga

SEQ ID NO: 758 - protein, 536 aa, synthetic construct
  REGION 1..536: note = Variant of B-Glucocerebrosidase
MEFSSPSREECPKPLSRVSIMAGSLTGLLLLQAVSWASGARPCIPKSFGYSSVVCVCNATYCDSFDPPTLPALGTFSRYESTRSGRRMELSMGPIQANHTGTGLLLTLQPEQKFQKVKGFGGAMTDAAALNILALSPPAQNLLLKSYFSEEGIGYNIIRVPMASCDFSIRTYTYADTPDDFQLHNFSLPEEDTKLKIPLIHRALQLSQRPVSLFASPWTSPTWLKTNGAVNGKGSLKGQPGDIYHQTWARYFVKFLDAYAEHKLQFWAVTAENEPSAGLLSGYPFQCLGFTPEHQRDFIARDLGPTLANSTHHNVRLLMLDDQRLLLPHWAKVVLTDPEAAKYVHGIAVHWYLDFLAPAKATLGETHRLFPNTMLFASEACVGSKFWEQSVRLGSWDRGMQYSHSIITNLLYHVVGWTDWNLALNPEGGPNWVRNFVDSPIIVDITKDTFYKQPMFYHLGHFSKFIPEGSQRVGLVASRKNDLDAVALLHPDGSAVVVVLNRSSKDVPLTIKDPAVGFLETISPGYSIHTYLWRRQ

SEQ ID NO: 759 - DNA, 1614 bp, synthetic construct
  misc_feature 1..1614: note = Variant of B-Glucocerebrosidase
  source 1..1614: mol_type = other DNA
atggagttttcttctcctagtagagaagaatgccccaagccactgagcagggtgagcatcatggctggatccctcacagggctgcttcttttgcaggcagtctcatgggcctctggagccagggcgtgtattcccaagtcattcggctactcctcagtggtgtgtgtatgcaatgccacctattgtgacagtttcgatcctccaactctccctgctctgggtaccttctcccggtatgagagcacaagaagtggaagacgcatggagctctcaatgggccctatacaggctaaccacactgggacaggtctgctgctgaccctccaacctgaacagaagtttcagaaagtcaagggatttggaggagccatgactgatgcagcagcactcaacatcttggccctgtctccaccagcccagaatctgctgttgaagtcctacttctcagaggaggggattggctacaacatcatccgggttcccatggctagctgtgacttctccattaggacctatacatacgctgacacccccgatgattttcagctccataatttcagtctccctgaagaagacaccaaactgaagatacctctgattcacagagccttgcaactgtcccaaaggccagtgagcctcttcgcttctccctggactagtcctacatggctgaagactaatggtgctgttaatgggaaaggctccctgaaaggacagccaggtgacatatatcatcagacatgggcccgctactttgtgaaattccttgatgcctatgcagagcacaagctccaattctgggcagtcaccgcagaaaacgagccctcagctgggctgctgtctggctacccctttcagtgcttgggctttactcctgagcatcaacgggacttcattgcccgggatttggggccaacactggccaacagcacccaccacaatgtaagactcctcatgctggatgaccagaggctgctgctccctcattgggccaaggtggtgttgacagacccagaagctgccaaatatgttcatggcatcgctgtccactggtacctggattttttggcccctgcaaaggctactctgggagagacccacagactcttccccaataccatgctgtttgcatcagaagcctgcgtggggagcaaattctgggagcagtctgttaggctgggttcctgggatcggggcatgcaatattcccatagtataataactaacctcctctaccacgtggtaggatggacagactggaatctggctttgaacccagaaggaggccccaattgggtgcgcaactttgttgacagccccatcattgtggatatcacaaaggacaccttctacaaacagcctatgttctatcatctggggcactttagcaagttcattccagagggttcccagagagtaggcttggttgcctcacagaagaatgatctggatgctgtggcactcctgcatcctgacgggagtgcagtggtggtagtactgaacaggtctagcaaagatgttcccttgactatcaaagacccagctgtgggctttctggaaaccatttcccctggatactctatccacacctatctctggagaagacagtaatga

SEQ ID NO: 760 - protein, 536 aa, synthetic construct
  REGION 1..536: note = Variant of B-Glucocerebrosidase
MEFSSPSREECPKPLSRVSIMAGSLTGLLLLQAVSWASGARACIPKSFGYSSVVCVCNATYCDSFDPPTLPALGTFSRYESTRSGRRMELSMGPIQANHTGTGLLLTLQPEQKFQKVKGFGGAMTDAAALNILALSPPAQNLLLKSYFSEEGIGYNIIRVPMASCDFSIRTYTYADTPDDFQLHNFSLPEEDTKLKIPLIHRALQLSQRPVSLFASPWTSPTWLKTNGAVNGKGSLKGQPGDIYHQTWARYFVKFLDAYAEHKLQFWAVTAENEPSAGLLSGYPFQCLGFTPEHQRDFIARDLGPTLANSTHHNVRLLMLDDQRLLLPHWAKVVLTDPEAAKYVHGIAVHWYLDFLAPAKATLGETHRLFPNTMLFASEACVGSKFWEQSVRLGSWDRGMQYSHSIITNLLYHVVGWTDWNLALNPEGGPNWVRNFVDSPIIVDITKDTFYKQPMFYHLGHFSKFIPEGSQRVGLVASQKNDLDAVALLHPDGSAVVVVLNRSSKDVPLTIKDPAVGFLETISPGYSIHTYLWRRQ

SEQ ID NO: 761 - DNA, 1614 bp, synthetic construct
  misc_feature 1..1614: note = Variant of B-Glucocerebrosidase
  source 1..1614: mol_type = other DNA
atggagttttcttctcctagtagagaagaatgccccaagccactgagcagggtgagcatcatggctggatccctcacagggctgcttcttttgcaggcagtctcatgggcctctggagccaggccctgtattcccaagtcattcggctactcctcagtggtgtgtgtatgcaatgccacctattgtgacagtttcgatcctccaactctccctgctctgggtaccttctcccggtatgagagcacaagaagtggaagacgcatggagctctcaatgggccctatacaggctaaccacactgggacaggtctgctgctgaccctccaacctgaacagaagtttcagaaagtcaagggatttggaggagccatgactgatgcagcagcactcaacatcttggccctgtctccaccagcccagaatctgctgttgaagtcctacttctcagaggaggggattggctacaacatcatccgggttcccatggctagctgtgacttctccattaggacctatacatacgctgacacccccgatgattttcagctccataatttcagtctccctgaagaagacaccaaactgaagatacctctgattcacagagccttgcaactgtcccaaaggccagtgagcctcttcgcttctccctggactagtcctacatggctgaagactaatggtgctgttaatgggaaaggctccctgaaaggaattccaggtgacatctatcatcagacatgggcccgctactttgtgaaattccttgatgcctatgcagagcacaagctccaattctgggcagtcaccgcagaaaacgagccctcagctgggctgctgtctggctacccctttcagtgcttgggctttactcctgagcatcaacgggacttcattgcccgggatttggggccaacactggccaacagcacccaccacaatgtaagactcctcatgctggatgaccagaggctgctgctccctcattgggccaaggtggtgttgacagacccagaagctgccaaatatgttcatggcatcgctgtccactggtacctggattttttggcccctgcaaaggctactctgggagagacccacagactcttccccaataccatgctgtttgcatcagaagcctgcgtggggagcaaattctgggagcagtctgttaggctgggttcctgggatcggggcatgcaatattcccatagtataataactaacctcctctaccacgtggtaggatggacagactggaatctggctttgaacccagaaggaggccccaattgggtgcgcaactttgttgacagccccatcattgtggatatcacaaaggacaccttctacaaacagcctatgttctatcatctggggcactttagcaagttcattccagagggttcccagagagtaggcttggttgcctcacagaagaatgatctggatgctgtggcactcctgcatcctgacgggagtgcagtggtggtagtactgaacaggtctagcaaagatgttcccttgactatcaaagacccagctgtgggctttctggaaaccatttcccctggatactctatccacacctatctctggagaagacagtaatga

SEQ ID NO: 762 - protein, 536 aa, synthetic construct
  REGION 1..536: note = Variant of B-Glucocerebrosidase
MEFSSPSREECPKPLSRVSIMAGSLTGLLLLQAVSWASGARPCIPKSFGYSSVVCVCNATYCDSFDPPTLPALGTFSRYESTRSGRRMELSMGPIQANHTGTGLLLTLQPEQKFQKVKGFGGAMTDAAALNILALSPPAQNLLLKSYFSEEGIGYNIIRVPMASCDFSIRTYTYADTPDDFQLHNFSLPEEDTKLKIPLIHRALQLSQRPVSLFASPWTSPTWLKTNGAVNGKGSLKGIPGDIYHQTWARYFVKFLDAYAEHKLQFWAVTAENEPSAGLLSGYPFQCLGFTPEHQRDFIARDLGPTLANSTHHNVRLLMLDDQRLLLPHWAKVVLTDPEAAKYVHGIAVHWYLDFLAPAKATLGETHRLFPNTMLFASEACVGSKFWEQSVRLGSWDRGMQYSHSIITNLLYHVVGWTDWNLALNPEGGPNWVRNFVDSPIIVDITKDTFYKQPMFYHLGHFSKFIPEGSQRVGLVASQKNDLDAVALLHPDGSAVVVVLNRSSKDVPLTIKDPAVGFLETISPGYSIHTYLWRRQ

SEQ ID NO: 763 - DNA, 1614 bp, synthetic construct
  misc_feature 1..1614: note = Variant of B-Glucocerebrosidase
  source 1..1614: mol_type = other DNA
atggagttttcttctcctagtagagaagaatgccccaagccactgagcagggtgagcatcatggctggatccctcacagggctgcttcttttgcaggcagtctcatgggcctctggagccaggccctgtattcccaagtcattcggctactcctcagtggtgtgtgtatgcaatgccacctattgtgacagtttcgatcctccaactctccctgctctgggtaccttctcccggtatgagagcacaagaagtggaagacgcatggagctctcaatgggcccaatacagattaaccacactgggacaggtctgctgctgaccctccaacctgaacagaagtttcagaaagtcaagggatttggaggagccatgactgatgcagcagcactcaacatcttggccctgtctccaccagcccagaatctgctgttgaagtcctacttctcagaggaggggattggctacaacatcatccgggttcccatggctagctgtgacttctccattaggacctatacatacgctgacacccccgatgattttcagctccataatttcagtctccctgaagaagacaccaaactgaagatacctctgattcacagagccttgcaactgtcccaaaggccagtgagcctcttcgcttctccctggactagtcctacatggctgaagactaatggtgctgttaatgggaaaggctccctgaaaggacagccaggtgacatatatcatcagacatgggcccgctactttgtgaaattccttgatgcctatgcagagcacaagctccaattctgggcagtcaccgcagaaaacgagccctcagctgggctgctgtctggctacccctttcagtgcttgggctttactcctgagcatcaacgggacttcattgcccgggatttggggccaacactggccaacagcacccaccacaatgtaagactcctcatgctggatgaccagaggctgctgctccctcattgggccaaggtggtgttgacagacccagaagctgccaaatatgttcatggcatcgctgtccactggtacctggattttttggcccctgcaaaggctactctgggagagacccacagactcttccccaataccatgctgtttgcatcagaagcctgcgtggggagcaaattctgggagcagtctgttaggctgggttcctgggatcggggcatgcaatattcccatagtataataactaacctcctctaccacgtggtaggatggacagactggaatctggctttgaacccagaaggaggccccaattgggtgcgcaactttgttgacagccccatcattgtggatatcacaaaggacaccttctacaaacagcctatgttctatcatctggggcactttagcaagttcattccagagggttcccagagagtaggcttggttgcctcacagaagaatgatctggatgctgtggcactcctgcatcctgacgggagtgcagtggtggtagtactgaacaggtctagcaaagatgttcccttgactatcaaagacccagctgtgggctttctggaaaccatttcccctggatactctatccacacctatctctggagaagacagtaatga

SEQ ID NO: 764 - protein, 536 aa, synthetic construct
  REGION 1..536: note = Variant of B-Glucocerebrosidase
MEFSSPSREECPKPLSRVSIMAGSLTGLLLLQAVSWASGARPCIPKSFGYSSVVCVCNATYCDSFDPPTLPALGTFSRYESTRSGRRMELSMGPIQINHTGTGLLLTLQPEQKFQKVKGFGGAMTDAAALNILALSPPAQNLLLKSYFSEEGIGYNIIRVPMASCDFSIRTYTYADTPDDFQLHNFSLPEEDTKLKIPLIHRALQLSQRPVSLFASPWTSPTWLKTNGAVNGKGSLKGQPGDIYHQTWARYFVKFLDAYAEHKLQFWAVTAENEPSAGLLSGYPFQCLGFTPEHQRDFIARDLGPTLANSTHHNVRLLMLDDQRLLLPHWAKVVLTDPEAAKYVHGIAVHWYLDFLAPAKATLGETHRLFPNTMLFASEACVGSKFWEQSVRLGSWDRGMQYSHSIITNLLYHVVGWTDWNLALNPEGGPNWVRNFVDSPIIVDITKDTFYKQPMFYHLGHFSKFIPEGSQRVGLVASQKNDLDAVALLHPDGSAVVVVLNRSSKDVPLTIKDPAVGFLETISPGYSIHTYLWRRQ

SEQ ID NO: 765 - DNA, 1614 bp, synthetic construct
  misc_feature 1..1614: note = Variant of B-Glucocerebrosidase
  source 1..1614: mol_type = other DNA
atggagttttcttctcctagtagagaagaatgccccaagccactgagcagggtgagcatcatggctggatccctcacagggctgcttcttttgcaggcagtctcatgggcctctggagccaggccctgtattcccaagtcattcggctactcctcagtggtgtgtgtatgcaatgccacctattgtgacagtttcgatcctccaactctccctgctctgggtaccttctcccggtatgagagcacaagaagtggaagacgcatggagctctcaatgggccctatacaggctaaccacactgggacaggtctgctgctgaccctccaacctgaacagaagtttcaggaggtcaagggatttggaggagccatgactgatgcagcagcactcaacatcttggccctgtctccaccagcccagaatctgctgttgaagtcctacttctcagaggaggggattggctacaacatcatccgggttcccatggctagctgtgacttctccattaggacctatacatacgctgacacccccgatgattttcagctccataatttcagtctccctgaagaagacaccaaactgaagatacctctgattcacagagccttgcaactgtcccaaaggccagtgagcctcttcgcttctccctggactagtcctacatggctgaagactaatggtgctgttaatgggaaaggctccctgaaaggacagccaggtgacatatatcatcagacatgggcccgctactttgtgaaattccttgatgcctatgcagagcacaagctccaattctgggcagtcaccgcagaaaacgagccctcagctgggctgctgtctggctacccctttcagtgcttgggctttactcctgagcatcaacgggacttcattgcccgggatttggggccaacactggccaacagcacccaccacaatgtaagactcctcatgctggatgaccagaggctgctgctccctcattgggccaaggtggtgttgacagacccagaagctgccaaatatgttcatggcatcgctgtccactggtacctggattttttggcccctgcaaaggctactctgggagagacccacagactcttccccaataccatgctgtttgcatcagaagcctgcgtggggagcaaattctgggagcagtctgttaggctgggttcctgggatcggggcatgcaatattcccatagtataataactaacctcctctaccacgtggtaggatggacagactggaatctggctttgaacccagaaggaggccccaattgggtgcgcaactttgttgacagccccatcattgtggatatcacaaaggacaccttctacaaacagcctatgttctatcatctggggcactttagcaagttcattccagagggttcccagagagtaggcttggttgcctcacagaagaatgatctggatgctgtggcactcctgcatcctgacgggagtgcagtggtggtagtactgaacaggtctagcaaagatgttcccttgactatcaaagacccagctgtgggctttctggaaaccatttcccctggatactctatccacacctatctctggagaagacagtaatga

SEQ ID NO: 766 - protein, 536 aa, synthetic construct
  REGION 1..536: note = Variant of B-Glucocerebrosidase
MEFSSPSREECPKPLSRVSIMAGSLTGLLLLQAVSWASGARPCIPKSFGYSSVVCVCNATYCDSFDPPTLPALGTFSRYESTRSGRRMELSMGPIQANHTGTGLLLTLQPEQKFQEVKGFGGAMTDAAALNILALSPPAQNLLLKSYFSEEGIGYNIIRVPMASCDFSIRTYTYADTPDDFQLHNFSLPEEDTKLKIPLIHRALQLSQRPVSLFASPWTSPTWLKTNGAVNGKGSLKGQPGDIYHQTWARYFVKFLDAYAEHKLQFWAVTAENEPSAGLLSGYPFQCLGFTPEHQRDFIARDLGPTLANSTHHNVRLLMLDDQRLLLPHWAKVVLTDPEAAKYVHGIAVHWYLDFLAPAKATLGETHRLFPNTMLFASEACVGSKFWEQSVRLGSWDRGMQYSHSIITNLLYHVVGWTDWNLALNPEGGPNWVRNFVDSPIIVDITKDTFYKQPMFYHLGHFSKFIPEGSQRVGLVASQKNDLDAVALLHPDGSAVVVVLNRSSKDVPLTIKDPAVGFLETISPGYSIHTYLWRRQ

SEQ ID NO: 767 - DNA, 1614 bp, synthetic construct
  misc_feature 1..1614: note = Variant of B-Glucocerebrosidase
  source 1..1614: mol_type = other DNA
atggagttttcttctcctagtagagaagaatgccccaagccactgagcagggtgagcatcatggctggatccctcacagggctgcttcttttgcaggcagtctcatgggcctctggagccaggccctgtattcccaagtcattcggctactcctcagtggtgtgtgtatgcaatgccacctattgtgacagtttcgatcctccaactctccctgctctgggtaccttctcccggtatgagagcacaagaagtggaagacgcatggagctctcaatgggccctatacaggctaaccacactgggacaggtctgctgctgaccctccaacctgaacagatttttcagaaagtcaagggatttggaggagccatgactgatgcagcagcactcaacatcttggccctgtctccaccagcccagaatctgctgttgaagtcctacttctcagaggaggggattggctacaacatcatccgggttcccatggctagctgtgacttctccattaggacctatacatacgctgacacccccgatgattttcagctccataatttcagtctccctgaagaagacaccaaactgaagatacctctgattcacagagccttgcaactgtcccaaaggccagtgagcctcttcgcttctccctggactagtcctacatggctgaagactaatggtgctgttaatgggaaaggctccctgaaaggacagccaggtgacatatatcatcagacatgggcccgctactttgtgaaattccttgatgcctatgcagagcacaagctccaattctgggcagtcaccgcagaaaacgagccctcagctgggctgctgtctggctacccctttcagtgcttgggctttactcctgagcatcaacgggacttcattgcccgggatttggggccaacactggccaacagcacccaccacaatgtaagactcctcatgctggatgaccagaggctgctgctccctcattgggccaaggtggtgttgacagacccagaagctgccaaatatgttcatggcatcgctgtccactggtacctggattttttggcccctgcaaaggctactctgggagagacccacagactcttccccaataccatgctgtttgcatcagaagcctgcgtggggagcaaattctgggagcagtctgttaggctgggttcctgggatcggggcatgcaatattcccatagtataataactaacctcctctaccacgtggtaggatggacagactggaatctggctttgaacccagaaggaggccccaattgggtgcgcaactttgttgacagccccatcattgtggatatcacaaaggacaccttctacaaacagcctatgttctatcatctggggcactttagcaagttcattccagagggttcccagagagtaggcttggttgcctcacagaagaatgatctggatgctgtggcactcctgcatcctgacgggagtgcagtggtggtagtactgaacaggtctagcaaagatgttcccttgactatcaaagacccagctgtgggctttctggaaaccatttcccctggatactctatccacacctatctctggagaagacagtaatga

SEQ ID NO: 768 - protein, 536 aa, synthetic construct
  REGION 1..536: note = Variant of B-Glucocerebrosidase
MEFSSPSREECPKPLSRVSIMAGSLTGLLLLQAVSWASGARPCIPKSFGYSSVVCVCNATYCDSFDPPTLPALGTFSRYESTRSGRRMELSMGPIQANHTGTGLLLTLQPEQIFQKVKGFGGAMTDAAALNILALSPPAQNLLLKSYFSEEGIGYNIIRVPMASCDFSIRTYTYADTPDDFQLHNFSLPEEDTKLKIPLIHRALQLSQRPVSLFASPWTSPTWLKTNGAVNGKGSLKGQPGDIYHQTWARYFVKFLDAYAEHKLQFWAVTAENEPSAGLLSGYPFQCLGFTPEHQRDFIARDLGPTLANSTHHNVRLLMLDDQRLLLPHWAKVVLTDPEAAKYVHGIAVHWYLDFLAPAKATLGETHRLFPNTMLFASEACVGSKFWEQSVRLGSWDRGMQYSHSIITNLLYHVVGWTDWNLALNPEGGPNWVRNFVDSPIIVDITKDTFYKQPMFYHLGHFSKFIPEGSQRVGLVASQKNDLDAVALLHPDGSAVVVVLNRSSKDVPLTIKDPAVGFLETISPGYSIHTYLWRRQ

SEQ ID NO: 769 - DNA, 1614 bp, synthetic construct
  misc_feature 1..1614: note = Variant of B-Glucocerebrosidase
  source 1..1614: mol_type = other DNA
atggagttttcttctcctagtagagaagaatgccccaagccactgagcagggtgagcatcatggctggatccctcacagggctgcttcttttgcaggcagtctcatgggcctctggagccaggccctgtattcccaagtcattcggctactcctcagtggtgtgtgtatgcaatgccacctattgtgacagtttcgatcctccaactctccctgctctgggtaccttctcccggtatgagagcacaagaagtggaagacgcatggagctctcaatgggccctatacaggctaaccacactgggacaggtctgctgctgaccctccaacctgaacagaagtttcagaaagtcaagggatttggaggagccatgactgatgcagcagcactcaacatcttggccctgtctccaccagcccagaatctgctgttgaagtcctacttctcagaggaggggattggctacaacatcatccgggttcccatggctagctgtgacttctccattaggacctatacatacgctgacacccccgatgattttcagctccataatttcagtctccctgaagaagacaccaaactgaagatacctctgattcacagagccttgcaactgtcccaaaggccagtgagcctcttcgcttctccctggactagtcctacatggctgaagactaatggtgctgttaatgggaaaggctccctgaaaggacagccaggtgacatatatcatcagacatgggcccgctactttgtgaaattccttgatgcctatgcagagcacaagctccaattctgggcagtcaccgcagaaaacgagccctcagctgggctgctgtctggctacccctttcagtgcttgggctttactcctgagcatcaacgggacttcattgcccgggatttggggccaacactggccaacagcacccaccacaatgtaagactcctcatgctggatgaccagaggctgctgctccctcattgggccaaggtggtgttgacagacccagaagctgccaaatatgttcatggcatcgctgtccactggtacctggattttttggcccctgcaaaggctactctgggagagacccacagactcttccccaataccatgctgtttgcatcagaagcctgcgtggggagcaaattctgggagcagtctgttaggctgggttcctgggatcggggcatgcaatattcccatagtataataactaacctcctctaccacgtggtaggatggacagactggaatctggctttgaacccagaaggaggccccaattgggtgcgcaactttgttgacagccccatcattgtggatatcacaaaggacaccttctacaaacagcctatgttctatcatctggggcactttagcaagttcattccagagggttcccagagagtaggcttggttgtttcacagaagaatgatctggatgctgtggcactcctgcatcctgacgggagtgcagtggtggtagtactgaacaggtctagcaaagatgttcccttgactatcaaagacccagctgtgggctttctggaaaccatttcccctggatactctatccacacctatctctggagaagacagtaatga

SEQ ID NO: 770 - protein, 536 aa, synthetic construct
  REGION 1..536: note = Variant of B-Glucocerebrosidase
MEFSSPSREECPKPLSRVSIMAGSLTGLLLLQAVSWASGARPCIPKSFGYSSVVCVCNATYCDSFDPPTLPALGTFSRYESTRSGRRMELSMGPIQANHTGTGLLLTLQPEQKFQKVKGFGGAMTDAAALNILALSPPAQNLLLKSYFSEEGIGYNIIRVPMASCDFSIRTYTYADTPDDFQLHNFSLPEEDTKLKIPLIHRALQLSQRPVSLFASPWTSPTWLKTNGAVNGKGSLKGQPGDIYHQTWARYFVKFLDAYAEHKLQFWAVTAENEPSAGLLSGYPFQCLGFTPEHQRDFIARDLGPTLANSTHHNVRLLMLDDQRLLLPHWAKVVLTDPEAAKYVHGIAVHWYLDFLAPAKATLGETHRLFPNTMLFASEACVGSKFWEQSVRLGSWDRGMQYSHSIITNLLYHVVGWTDWNLALNPEGGPNWVRNFVDSPIIVDITKDTFYKQPMFYHLGHFSKFIPEGSQRVGLVVSQKNDLDAVALLHPDGSAVVVVLNRSSKDVPLTIKDPAVGFLETISPGYSIHTYLWRRQ

SEQ ID NO: 771 - DNA, 1614 bp, synthetic construct
  misc_feature 1..1614: note = Variant of B-Glucocerebrosidase
  source 1..1614: mol_type = other DNA
atggagttttcttctcctagtagagaagaatgccccaagccactgagcagggtgagcatcatggctggatccctcacagggctgcttcttttgcaggcagtctcatgggcctctggagccaggccctgtattcccaagtcattcggctactcctcagtggtgtgtgtatgcaatgccacctattgtgacagtttcgatcctccaactctccctgctctgggtaccttctcccggtatgagagcacaagaagtggaagacgcatggagctctcaatgggccctatacaggctaaccacactgggacaggtctgctgctgaccctccaacctgaacagaagtttcagaaagtcaagggatttggaggagccatgactgatgcagcagcactcaacatcttggccctgtctccaccagcccagaatctgctgttgaagtcctacttctcagaggaggggattggctacaacatcatccgggttcccatggctagctgtgacttctccattaggacctatacatacgctgacacccccgatgattttcagctccataatttcagtctccctgaagaagacaccaaactgaagatacctctgattcacagagccttgcaactgtcccaaaggccagtgagcctcttcgcttctccctggactagtcctacatggctgaagactaatggtgctgttaatgggaaaggctccctgaaaggacagccaggtgacatatatcatcagacatgggcccgctactttgtgaaattccttgatgcctatgcagagcacaagctccaattctgggcagtcaccgcagaaaacgagccctcagctgggctgctgtctggctacccctttcagtgcttgggctttactcctgagcatcaacgggacttcattgcccgggatttggggccaacactggccaacagcacccaccacaatgtaagactcctcatgctggatgaccagaggctgctgctccctcattgggccaaggtggtgttgacagacccagaagctgccaaatatgttcatggcatcgctgtccactggtacctggattttttggcccctgcaaaggctactctgggagagacccacagactcttccccaataccatgctgtttgcatcagaagcctgcgtggggagcaaattctgggagcagtctgttaggctgggttcctgggatcggggcatgcaatattcccatagtataataactaacctcctctaccacgtggtaggatggacagactggaatctggctttgaacccagaaggaggccccaattgggtgcgcaactttgttgacagccccatcattgtggatatcacaaaggacaccttctacaaacagcctatgttctatcatctggggcactttagcaagttcattccagagggttcccagagagtaggcttggttgcctcacagaagaatgatctggatgctgtggcactcctgcatcctgacgggagtgcagtggtggtagtactgaacaggtctagcaaagatgttcccttgactatcaaagacccagctgtgggctttctggaaaccatttcccctggatactctatccacacctatctctggagaagaatttaatga

SEQ ID NO: 772 - protein, 536 aa, synthetic construct
  REGION 1..536: note = Variant of B-Glucocerebrosidase
MEFSSPSREECPKPLSRVSIMAGSLTGLLLLQAVSWASGARPCIPKSFGYSSVVCVCNATYCDSFDPPTLPALGTFSRYESTRSGRRMELSMGPIQANHTGTGLLLTLQPEQKFQKVKGFGGAMTDAAALNILALSPPAQNLLLKSYFSEEGIGYNIIRVPMASCDFSIRTYTYADTPDDFQLHNFSLPEEDTKLKIPLIHRALQLSQRPVSLFASPWTSPTWLKTNGAVNGKGSLKGQPGDIYHQTWARYFVKFLDAYAEHKLQFWAVTAENEPSAGLLSGYPFQCLGFTPEHQRDFIARDLGPTLANSTHHNVRLLMLDDQRLLLPHWAKVVLTDPEAAKYVHGIAVHWYLDFLAPAKATLGETHRLFPNTMLFASEACVGSKFWEQSVRLGSWDRGMQYSHSIITNLLYHVVGWTDWNLALNPEGGPNWVRNFVDSPIIVDITKDTFYKQPMFYHLGHFSKFIPEGSQRVGLVASQKNDLDAVALLHPDGSAVVVVLNRSSKDVPLTIKDPAVGFLETISPGYSIHTYLWRRI

SEQ ID NO: 773 - DNA, 1614 bp, synthetic construct
  misc_feature 1..1614: note = Variant of B-Glucocerebrosidase
  source 1..1614: mol_type = other DNA
atggagttttcttctcctagtagagaagaatgccccaagccactgagcagggtgagcatcatggctggatccctcacagggctgcttcttttgcaggcagtctcatgggcctctggagccaggccctgtattcccaagtcattcggctactcctcagtggtgtgtgtatgcaatgccacctattgtgacagtttcgatcctccaactctccctgctctgggtaccttctcccggtatgagagcacaagaagtggaagacgcatggagctctcaatgggccctatacaggctaaccacactgggacaggtctgctgctgaccctccaacctgaacagaagtttcagaaagtcaagggatttggaggagccatgactgatgcagcagcactcaacatcttggccctgtctccaccagcccagaatctgctgttgaagtcctacttctcagaggaggggattggctacaacatcatccgggttcccatggctagctgtgacttctccattaggacctatacatacgctgacacccccgatgattttcagctccataatttcagtctccctgaagaagacaccaaactgaagatacctctgattcacagagccttgcaactgtcccaaaggccagtgagcctcttcgcttctccctggactagtcctacatggctgaagactaatggtgctgttaatgggaaaggctccctgaaaggacagccaggtgacatatatcatcagacatgggcccgctactttgtgaaattccttgatgcctatgcagagcacggtctccagttctgggcagtcaccgcagaaaacgagccctcagctgggctgctgtctggctacccctttcagtgcttgggctttactcctgagcatcaacgggacttcattgcccgggatttggggccaacactggccaacagcacccaccacaatgtaagactcctcatgctggatgaccagaggctgctgctccctcattgggccaaggtggtgttgacagacccagaagctgccaaatatgttcatggcatcgctgtccactggtacctggattttttggcccctgcaaaggctactctgggagagacccacagactcttccccaataccatgctgtttgcatcagaagcctgcgtggggagcaaattctgggagcagtctgttaggctgggttcctgggatcggggcatgcaatattcccatagtataataactaacctcctctaccacgtggtaggatggacagactggaatctggctttgaacccagaaggaggccccaattgggtgcgcaactttgttgacagccccatcattgtggatatcacaaaggacaccttctacaaacagcctatgttctatcatctggggcactttagcaagttcattccagagggttcccagagagtaggcttggttgcctcacagaagaatgatctggatgctgtggcactcctgcatcctgacgggagtgcagtggtggtagtactgaacaggtctagcaaagatgttcccttgactatcaaagacccagctgtgggctttctggaaaccatttcccctggatactctatccacacctatctctggagaagacagtaatga

SEQ ID NO: 774 - protein, 536 aa, synthetic construct
  REGION 1..536: note = Variant of B-Glucocerebrosidase
MEFSSPSREECPKPLSRVSIMAGSLTGLLLLQAVSWASGARPCIPKSFGYSSVVCVCNATYCDSFDPPTLPALGTFSRYESTRSGRRMELSMGPIQANHTGTGLLLTLQPEQKFQKVKGFGGAMTDAAALNILALSPPAQNLLLKSYFSEEGIGYNIIRVPMASCDFSIRTYTYADTPDDFQLHNFSLPEEDTKLKIPLIHRALQLSQRPVSLFASPWTSPTWLKTNGAVNGKGSLKGQPGDIYHQTWARYFVKFLDAYAEHGLQFWAVTAENEPSAGLLSGYPFQCLGFTPEHQRDFIARDLGPTLANSTHHNVRLLMLDDQRLLLPHWAKVVLTDPEAAKYVHGIAVHWYLDFLAPAKATLGETHRLFPNTMLFASEACVGSKFWEQSVRLGSWDRGMQYSHSIITNLLYHVVGWTDWNLALNPEGGPNWVRNFVDSPIIVDITKDTFYKQPMFYHLGHFSKFIPEGSQRVGLVASQKNDLDAVALLHPDGSAVVVVLNRSSKDVPLTIKDPAVGFLETISPGYSIHTYLWRRQ

SEQ ID NO: 775 - DNA, 1614 bp, synthetic construct
  misc_feature 1..1614: note = Variant of B-Glucocerebrosidase
  source 1..1614: mol_type = other DNA
atggagttttcttctcctagtagagaagaatgccccaagccactgagcagggtgagcatcatggctggatccctcacagggctgcttcttttgcaggcagtctcatgggcctctggagccaggccctgtattcccaagtcattcggctactcctcagtggtgtgtgtatgcaatgccacctattgtgacagtttcgatcctccaactctccctgctctgggtaccttctcccggtatgagagcacaagaagtggaagacgcatggagctctcaatgggcccaatacaggctaactctactgggacaggtctgctgctgaccctccaacctgaacagaagtttcagaaagtcaagggatttggaggagccatgactgatgcagcagcactcaacatcttggccctgtctccaccagcccagaatctgctgttgaagtcctacttctcagaggaggggattggctacaacatcatccgggttcccatggctagctgtgacttctccattaggacctatacatacgctgacacccccgatgattttcagctccataatttcagtctccctgaagaagacaccaaactgaagatacctctgattcacagagccttgcaactgtcccaaaggccagtgagcctcttcgcttctccctggactagtcctacatggctgaagactaatggtgctgttaatgggaaaggctccctgaaaggacagccaggtgacatatatcatcagacatgggcccgctactttgtgaaattccttgatgcctatgcagagcacaagctccaattctgggcagtcaccgcagaaaacgagccctcagctgggctgctgtctggctacccctttcagtgcttgggctttactcctgagcatcaacgggacttcattgcccgggatttggggccaacactggccaacagcacccaccacaatgtaagactcctcatgctggatgaccagaggctgctgctccctcattgggccaaggtggtgttgacagacccagaagctgccaaatatgttcatggcatcgctgtccactggtacctggattttttggcccctgcaaaggctactctgggagagacccacagactcttccccaataccatgctgtttgcatcagaagcctgcgtggggagcaaattctgggagcagtctgttaggctgggttcctgggatcggggcatgcaatattcccatagtataataactaacctcctctaccacgtggtaggatggacagactggaatctggctttgaacccagaaggaggccccaattgggtgcgcaactttgttgacagccccatcattgtggatatcacaaaggacaccttctacaaacagcctatgttctatcatctggggcactttagcaagttcattccagagggttcccagagagtaggcttggttgcctcacagaagaatgatctggatgctgtggcactcctgcatcctgacgggagtgcagtggtggtagtactgaacaggtctagcaaagatgttcccttgactatcaaagacccagctgtgggctttctggaaaccatttcccctggatactctatccacacctatctctggagaagacagtaatga

SEQ ID NO: 776 - protein, 536 aa, synthetic construct
  REGION 1..536: note = Variant of B-Glucocerebrosidase
MEFSSPSREECPKPLSRVSIMAGSLTGLLLLQAVSWASGARPCIPKSFGYSSVVCVCNATYCDSFDPPTLPALGTFSRYESTRSGRRMELSMGPIQANSTGTGLLLTLQPEQKFQKVKGFGGAMTDAAALNILALSPPAQNLLLKSYFSEEGIGYNIIRVPMASCDFSIRTYTYADTPDDFQLHNFSLPEEDTKLKIPLIHRALQLSQRPVSLFASPWTSPTWLKTNGAVNGKGSLKGQPGDIYHQTWARYFVKFLDAYAEHKLQFWAVTAENEPSAGLLSGYPFQCLGFTPEHQRDFIARDLGPTLANSTHHNVRLLMLDDQRLLLPHWAKVVLTDPEAAKYVHGIAVHWYLDFLAPAKATLGETHRLFPNTMLFASEACVGSKFWEQSVRLGSWDRGMQYSHSIITNLLYHVVGWTDWNLALNPEGGPNWVRNFVDSPIIVDITKDTFYKQPMFYHLGHFSKFIPEGSQRVGLVASQKNDLDAVALLHPDGSAVVVVLNRSSKDVPLTIKDPAVGFLETISPGYSIHTYLWRRQ

SEQ ID NO: 777 - DNA, 1614 bp, synthetic construct
  misc_feature 1..1614: note = Variant of B-Glucocerebrosidase
  source 1..1614: mol_type = other DNA
atggagttttcttctcctagtagagaagaatgccccaagccactgagcagggtgagcatcatggctggatccctcacagggctgcttcttttgcaggcagtctcatgggcctctggagccaggccctgtattcccaagtcattcggctactcctcagtggtgtgtgtatgcaatgccacctattgtgacagtttcgatcctccaactctccctgctctgggtaccttctcccggtatgagagcacaagaagtggaagacgcatggagctctcaatgggccctatacaggctaaccacactgggacaggtctgctgctgaccctccaacctgaacagaagtttcagaaagtcaagggatttggaggagccatgactgatgcagcagcactcaacatcttggccctgtctccaccagcccagaatctgctgttgaagtcctacttctcagaggaggggattggctacaacatcatccgggttcccatggctagctgtgacttctccattaggacctatacatacgctgacacccccgatgattttcagctccataatttcagtctccctgaagaagacaccaaactgaagatacctctgattcacagagccttgcaactgtcccaaaggccagtgagcctcttcgcttctccctggactagtcctatttggctgaagactaatggtgctgttaatgggaaaggctccctgaaaggacagccaggtgacatatatcatcagacatgggcccgctactttgtgaaattccttgatgcctatgcagagcacaagctccaattctgggcagtcaccgcagaaaacgagccctcagctgggctgctgtctggctacccctttcagtgcttgggctttactcctgagcatcaacgggacttcattgcccgggatttggggccaacactggccaacagcacccaccacaatgtaagactcctcatgctggatgaccagaggctgctgctccctcattgggccaaggtggtgttgacagacccagaagctgccaaatatgttcatggcatcgctgtccactggtacctggattttttggcccctgcaaaggctactctgggagagacccacagactcttccccaataccatgctgtttgcatcagaagcctgcgtggggagcaaattctgggagcagtctgttaggctgggttcctgggatcggggcatgcaatattcccatagtataataactaacctcctctaccacgtggtaggatggacagactggaatctggctttgaacccagaaggaggccccaattgggtgcgcaactttgttgacagccccatcattgtggatatcacaaaggacaccttctacaaacagcctatgttctatcatctggggcactttagcaagttcattccagagggttcccagagagtaggcttggttgcctcacagaagaatgatctggatgctgtggcactcctgcatcctgacgggagtgcagtggtggtagtactgaacaggtctagcaaagatgttcccttgactatcaaagacccagctgtgggctttctggaaaccatttcccctggatactctatccacacctatctctggagaagacagtaatga

SEQ ID NO: 778 - protein, 536 aa, synthetic construct
  REGION 1..536: note = Variant of B-Glucocerebrosidase
MEFSSPSREECPKPLSRVSIMAGSLTGLLLLQAVSWASGARPCIPKSFGYSSVVCVCNATYCDSFDPPTLPALGTFSRYESTRSGRRMELSMGPIQANHTGTGLLLTLQPEQKFQKVKGFGGAMTDAAALNILALSPPAQNLLLKSYFSEEGIGYNIIRVPMASCDFSIRTYTYADTPDDFQLHNFSLPEEDTKLKIPLIHRALQLSQRPVSLFASPWTSPIWLKTNGAVNGKGSLKGQPGDIYHQTWARYFVKFLDAYAEHKLQFWAVTAENEPSAGLLSGYPFQCLGFTPEHQRDFIARDLGPTLANSTHHNVRLLMLDDQRLLLPHWAKVVLTDPEAAKYVHGIAVHWYLDFLAPAKATLGETHRLFPNTMLFASEACVGSKFWEQSVRLGSWDRGMQYSHSIITNLLYHVVGWTDWNLALNPEGGPNWVRNFVDSPIIVDITKDTFYKQPMFYHLGHFSKFIPEGSQRVGLVASQKNDLDAVALLHPDGSAVVVVLNRSSKDVPLTIKDPAVGFLETISPGYSIHTYLWRRQ

SEQ ID NO: 779 - DNA, 1614 bp, synthetic construct
  misc_feature 1..1614: note = Variant of B-Glucocerebrosidase
  source 1..1614: mol_type = other DNA
atggagttttcttctcctagtagagaagaatgccccaagccactgagcagggtgagcatcatggctggatccctcacagggctgcttcttttgcaggcagtctcatgggcctctggagccaggccctgtattcccaagtcattcggctactcctcagtggtgtgtgtatgcaatgccacctattgtgacagtttcgatcctccaactctccctgctctgggtaccttctcccggtatgagagcacaagaagtggaagacgcatggagctctcaatgggccctatacaggctaaccacactgggacaggtctgctgctgaccctccaacctgaacagaagtttcagaaagtcaagggatttggaggagccatgactgatgcagcagcactcaacatcttggccctgtctccaccagcccagaatctgctgttgaagtcctacttctcagaggaggggattggctacaacatcatccgggttcccatggctagctgtgacttctccattaggacctatacatacgctgacacccccgatgattttcagctccataatttcagtctccctgaagaagacaccaaactgaagatacctctgattcacagagccttgcaactgtcccaaaggccagtgagcctcttcgcttctccctggactagtcctacatggctgaagactaatggtgctgttaatgggaaaggctccctgaaaggacagccaggtgacatatatcatcagacatgggcccgctactttgtgaaattccttgatgcctatgcagagcacaagctccaattctgggcagtcaccgcagaaaacgagccctcagctgggctgctgtctggctacccctttcagtgcttgggctttactcctgagcatcaacgggacttcattgcccgggatttggggccaacactggccaacagcacccaccacaatgtaagactcctcatgctggatgaccagaggctgctgctccctcattgggccaaggtggtgttgacagacccagaagctgccaaatatgttcatggcatcgctgtccactggtacctggattttttggcccctgcaaaggctactctgggagagacccacagactcttccccaataccatgctgtttgcatcagaagcctgcgtggggagcaaattctgggagcagtctgttaggctgggttcctgggatcggggcatgcaatattcccatagtataataactaacctcctctaccacgtggtaggatggacagactggaatctggctttgaacccagaaggaggccccaattgggtgcgcaactttgttgacagccccatcattgtggatatcacaaaggacaccttctacaaacagcctatgttctatcatctggggcactttagcaagttcattccagagggttcccagagagtaggcttggttgcctcacagaagaatgatctggatgctgtggcactcctgcatcctgacgggagtgcagtggtggtagtactgaacaggtctagcaaagatgttcccttgactatcaaagacccagctgtgggctttctggaaaccatttcccctggatactctatccacacctatctctggagaagagattaatga

SEQ ID NO: 780 - protein, 536 aa, synthetic construct
  REGION 1..536: note = Variant of B-Glucocerebrosidase
MEFSSPSREECPKPLSRVSIMAGSLTGLLLLQAVSWASGARPCIPKSFGYSSVVCVCNATYCDSFDPPTLPALGTFSRYESTRSGRRMELSMGPIQANHTGTGLLLTLQPEQKFQKVKGFGGAMTDAAALNILALSPPAQNLLLKSYFSEEGIGYNIIRVPMASCDFSIRTYTYADTPDDFQLHNFSLPEEDTKLKIPLIHRALQLSQRPVSLFASPWTSPTWLKTNGAVNGKGSLKGQPGDIYHQTWARYFVKFLDAYAEHKLQFWAVTAENEPSAGLLSGYPFQCLGFTPEHQRDFIARDLGPTLANSTHHNVRLLMLDDQRLLLPHWAKVVLTDPEAAKYVHGIAVHWYLDFLAPAKATLGETHRLFPNTMLFASEACVGSKFWEQSVRLGSWDRGMQYSHSIITNLLYHVVGWTDWNLALNPEGGPNWVRNFVDSPIIVDITKDTFYKQPMFYHLGHFSKFIPEGSQRVGLVASQKNDLDAVALLHPDGSAVVVVLNRSSKDVPLTIKDPAVGFLETISPGYSIHTYLWRRD

SEQ ID NO: 781 - DNA, 1614 bp, synthetic construct
  misc_feature 1..1614: note = Variant of B-Glucocerebrosidase
  source 1..1614: mol_type = other DNA
atggagttttcttctcctagtagagaagaatgccccaagccactgagcagggtgagcatcatggctggatccctcacagggctgcttcttttgcaggcagtctcatgggcctctggagccaggccctgtattcccaagtcattcggctactcctcagtggtgtgtgtatgcaatgccacctattgtgacagtttcgatcctccaactctccctgctctgggtaccttctcccggtatgagagcacaagaagtggaagacgcatggagctctcaatgggccctatacaggctaaccacactgggacaggtctgctgctgaccctccaacctgaacagaagtttcagaaagtcaagggatttggaggagccatgactgatgcagcagcactcaacatcttggccctgtctccaccagcccagaatctgctgttgaagtcctacttctcagaggaggggattggctacaacatcatccgggttcccatggctagctgtgacttctccattaggacctatacatacgctgacacccccgatgattttcagctccataatttcagtctccctgaagaagacaccaaactgaagatacctctgattcacagagccttgcaactgtcccaaaggccagtgagcctcttcgcttctccctggactagtcctacatggctgaagactaatggtgctgttaatgggaaaggctccctgaaaggacagccaggtgacatatatcatcagacatgggcccgctactttgtgaaattccttgatgcctatgcagagcacaagctccaattctgggcagtcaccgcagaaaacgagccctcagctgggctgctgtctggctacccctttcagtgcttgggctttactcctgagcatcaacgggacttcattgcccgggatttggggccaacactggccaacagcacccaccacaatgtaagactcctcatgctggatgaccagaggctgctgctccctcattgggccaaggtggtgttgacagacccagaagctgccaaatatgttcatggcatcgctgtccactggtacctggattttttggcccctgcaaaggctactctgggagagacccacagactcttccccaataccatgctgtttgcatcagaagcctgcgtggggagcaaattctgggagcagtctgttaggctgggttcctgggatcggggcatgcaatattcccatagtataataactaacctcctctaccacgtggtaggatggacagactggaatctggctttgaacccagaaggaggccccaattgggtgcgcaactttgttgacagccccatcattgtggatatcacaaaggacaccttctacaaacagcctatgttctatcatctggggcactttagcaagttcattccagagggttcccagagagtaggcttggttggttcacagaagaatgatctggatgctgtggcactcctgcatcctgacgggagtgcagtggtggtagtactgaacaggtctagcaaagatgttcccttgactatcaaagacccagctgtgggctttctggaaaccatttcccctggatactctatccacacctatctctggagaagacagtaatga

SEQ ID NO: 782 - protein, 536 aa, synthetic construct
  REGION 1..536: note = Variant of B-Glucocerebrosidase
MEFSSPSREECPKPLSRVSIMAGSLTGLLLLQAVSWASGARPCIPKSFGYSSVVCVCNATYCDSFDPPTLPALGTFSRYESTRSGRRMELSMGPIQANHTGTGLLLTLQPEQKFQKVKGFGGAMTDAAALNILALSPPAQNLLLKSYFSEEGIGYNIIRVPMASCDFSIRTYTYADTPDDFQLHNFSLPEEDTKLKIPLIHRALQLSQRPVSLFASPWTSPTWLKTNGAVNGKGSLKGQPGDIYHQTWARYFVKFLDAYAEHKLQFWAVTAENEPSAGLLSGYPFQCLGFTPEHQRDFIARDLGPTLANSTHHNVRLLMLDDQRLLLPHWAKVVLTDPEAAKYVHGIAVHWYLDFLAPAKATLGETHRLFPNTMLFASEACVGSKFWEQSVRLGSWDRGMQYSHSIITNLLYHVVGWTDWNLALNPEGGPNWVRNFVDSPIIVDITKDTFYKQPMFYHLGHFSKFIPEGSQRVGLVGSQKNDLDAVALLHPDGSAVVVVLNRSSKDVPLTIKDPAVGFLETISPGYSIHTYLWRRQ

SEQ ID NO: 783 - DNA, 1614 bp, synthetic construct
  misc_feature 1..1614: note = Variant of B-Glucocerebrosidase
  source 1..1614: mol_type = other DNA
atggagttttcttctcctagtagagaagaatgccccaagccactgagcagggtgagcatcatggctggatccctcacagggctgcttcttttgcaggcagtctcatgggcctctggagccaggccctgtattcccaagtcattcggctactcctcagtggtgtgtgtatgcaatgccacctattgtgacagtttcgatcctccaactctccctgctctgggtaccttctcccggtatgagagcacaagaagtggaagacgcatggagctctcaatgggccctatacaggctaaccacactgggacaggtctgctgctgaccctccaacctgaacagaagtttcagaaagtcaagggatttggaggagccatgactgatgcagcagcactcaacatcttggccctgtctccaccagcccagaatctgctgttgaagtcctacttctcagaggaggggattggctacaacatcatccgggttcccatggctagctgtgacttctccattaggacctatacatacgctgacacccccgatgattttcagctccataatttcagtctccctgaagaagacaccaaactgaagatacctctgattcacagagccttgcaactgtcccaaaggccagtgagcctcttcgcttctccctggactagtcctacatggctgaagactaatggtgctgttaatgggaaaggctccctgaaaggacagccaggtgacatatatcatcagacatgggcccgctactttgtgaaattccttgatgcctatgcagagcacaagctccaattctgggcagtcaccgcagaaaacgagccctcagctgggctgctgtctggctacccctttcagtgcttgggctttactcctgagcatcaacgggacttcattgcccgggatttggggccaacactggccaacagcacccaccacaatgtaagactcctcatgctggatgaccagaggctgctgctccctcattgggccaaggtggtgttgacagacccagaagctgccaaatatgttcatggcatcgctgtccactggtacctggattttttggcccctgcaaaggctactctgggagagacccacagactcttccccaataccatgctgtttgcatcagaagcctgcgtggggagcaaattctgggagcagtctgttaggctgggttcctgggatcggggcatgcaatattcccatagtataataactaacctcctctaccacgtggtaggatggacagactggaatctggctttgaacccagaaggaggccccaattgggtgcgcaactttgttgacagccccatcattgtggatatcacaaaggacaccttctacaaacagcctatgttctatcatctggggcactttagcaagttcattccagagggttcccagagagtaggcttggttgcctcacagaagaatgatctggatgctgtggcactcctgcatcctgacgggagtgcagtggtggtagtactgaacaggtctagcaaagatgttcccttgactatcaaagacccagctgtgggctttctggaaaccatttcccctggatactctatccacacctatctctggagaagatggtaatga

SEQ ID NO: 784 - protein, 536 aa, synthetic construct
  REGION 1..536: note = Variant of B-Glucocerebrosidase
MEFSSPSREECPKPLSRVSIMAGSLTGLLLLQAVSWASGARPCIPKSFGYSSVVCVCNATYCDSFDPPTLPALGTFSRYESTRSGRRMELSMGPIQANHTGTGLLLTLQPEQKFQKVKGFGGAMTDAAALNILALSPPAQNLLLKSYFSEEGIGYNIIRVPMASCDFSIRTYTYADTPDDFQLHNFSLPEEDTKLKIPLIHRALQLSQRPVSLFASPWTSPTWLKTNGAVNGKGSLKGQPGDIYHQTWARYFVKFLDAYAEHKLQFWAVTAENEPSAGLLSGYPFQCLGFTPEHQRDFIARDLGPTLANSTHHNVRLLMLDDQRLLLPHWAKVVLTDPEAAKYVHGIAVHWYLDFLAPAKATLGETHRLFPNTMLFASEACVGSKFWEQSVRLGSWDRGMQYSHSIITNLLYHVVGWTDWNLALNPEGGPNWVRNFVDSPIIVDITKDTFYKQPMFYHLGHFSKFIPEGSQRVGLVASQKNDLDAVALLHPDGSAVVVVLNRSSKDVPLTIKDPAVGFLETISPGYSIHTYLWRRW

SEQ ID NO: 785 - DNA, 1614 bp, synthetic construct
  misc_feature 1..1614: note = Variant of B-Glucocerebrosidase
  source 1..1614: mol_type = other DNA
atggagttttcttctcctagtagagaagaatgccccaagccactgagcagggtgagcatcatggctggatccctcacagggctgcttcttttgcaggcagtctcatgggcctctggagccaggccctgtattcccaagtcattcggctactcctcagtggtgtgtgtatgcaatgccacctattgtgacagtttcgatcctccaactctccctgctctgggtaccttctcccggtatgagagcacaagaagtggaagacgcatggagctctcaatgggccctatacaggctaaccacactgggacaggtctgctgctgaccctccaacctgaacagaagtttcagaaagtcaagggatttggaggagccatgactgatgcagcagcactcaacatcttggccctgtctccaccagcccagaatctgctgttgaagtcctacttctcagaggaggggattggctacaacatcatccgggttcccatggctagctgtgacttctccattaggacctatacatacgctgacacccccgatgattttcagctccataatttcagtctccctgaagaagacaccaaactgaagatacctctgattcacagagccttgcaactgtcccaaaggccagtgagcctcttcgcttctccctggactagtcctacatggctgaagactaatggtgctgttaatgggaaaggctccctgaaaggacagccaggtgacatatatcatcagacatgggcccgctactttgtgaaattccttgatgcctatgcagagcacaagctccaattctgggcagtcaccgcagaaaacgagccctcagctgggctgctgtctggctacccctttcagtgcttgggctttactcctgagcatcaacgggacttcattgcccgggatttggggccaacactggccaacagcacccaccacaatgtaagactcctcatgctggatgaccagaggctgctgctccctcattgggccaaggtggtgttgacagacccagaagctgccaaatatgttcatggcatcgctgtccactggtacctggattttttggcccctgcaaaggctactctgggagagacccacagactcttccccaataccatgctgtttgcatcagaagcctgcgtggggagcaaattctgggagcagtctgttaggctgggttcctgggatcggggcatgcaatattcccatagtataataactaacctcctctaccacgtggtaggatggacagactggaatctggctttgaacccagaaggaggccccaattgggtgcgcaactttgttgacagccccatcattgtggatatcacaaaggacaccttctacaaacagcctatgttctatcatctggggcactttagcaagttcattccagagggttcccagagagtaggcttggttgcctcacagaagaatgatctggatgctgtggcactcctgcatcctgacgggagtgcagtggtggtagtactgaacaggtctagcaaagatgttcccttgactatcaaagacccagctgtgggctttctggaaaccatttcccctggatactctatccacacctatctctggagaagatgttaatga

SEQ ID NO: 786 - protein, 536 aa, synthetic construct
  REGION 1..536: note = Variant of B-Glucocerebrosidase
MEFSSPSREECPKPLSRVSIMAGSLTGLLLLQAVSWASGARPCIPKSFGYSSVVCVCNATYCDSFDPPTLPALGTFSRYESTRSGRRMELSMGPIQANHTGTGLLLTLQPEQKFQKVKGFGGAMTDAAALNILALSPPAQNLLLKSYFSEEGIGYNIIRVPMASCDFSIRTYTYADTPDDFQLHNFSLPEEDTKLKIPLIHRALQLSQRPVSLFASPWTSPTWLKTNGAVNGKGSLKGQPGDIYHQTWARYFVKFLDAYAEHKLQFWAVTAENEPSAGLLSGYPFQCLGFTPEHQRDFIARDLGPTLANSTHHNVRLLMLDDQRLLLPHWAKVVLTDPEAAKYVHGIAVHWYLDFLAPAKATLGETHRLFPNTMLFASEACVGSKFWEQSVRLGSWDRGMQYSHSIITNLLYHVVGWTDWNLALNPEGGPNWVRNFVDSPIIVDITKDTFYKQPMFYHLGHFSKFIPEGSQRVGLVASQKNDLDAVALLHPDGSAVVVVLNRSSKDVPLTIKDPAVGFLETISPGYSIHTYLWRRC

SEQ ID NO: 787 - DNA, 1614 bp, synthetic construct
  misc_feature 1..1614: note = Variant of B-Glucocerebrosidase
  source 1..1614: mol_type = other DNA
atggagttttcttctcctagtagagaagaatgccccaagccactgagcagggtgagcatcatggctggatccctcacagggctgcttcttttgcaggcagtctcatgggcctctggagccaggccctgtattcccaagtcattcggctactcctcagtggtgtgtgtatgcaatgccacctattgtgacagtttcgatcctccaactctccctgctctgggtaccttctcccggtatgagagcacaagaagtggaagacgcatggagctctcaatgggccctatacaggctaaccacactgggacaggtctgctgctgaccctccaacctgaacagaagtttcagaaagtcaagggatttggaggagccatgactgatgcagcagcactcaacatcttggccctgtctccaccagcccagaatctgctgttgaagtcctacttctcagaggaggggattggctacaacatcatccgggttcccatggctagctgtgacttctccattaggacctatacatacgctgacacccccgatgattttcagctccataatttcagtctccctgaagaagacaccaaactgaagatacctctgattcacagagccttgcaactgtcccaaaggccagtgagcctcttcgcttctccctggactagtcctacatggctgaagactaatggtgctgttaatgggaaaggctccctgaaaggacagccaggtgacatatatcatcagacatgggcccgctactttgtgaaattccttgatgcctatgcagagcacaagctccaattctgggcagtcaccgcagaaaacgagccctcagctgggctgctgtctggctacccctttcagtgcttgggctttactcctgagcatcaacgggacttcattgcccgggatttggggccaacactggccaacagcacccaccacaatgtaagactcctcatgctggatgaccagaggctgctgctccctcattgggccaaggtggtgttgcgtgacccagaagctgccaaatatgttcatggcatcgctgtccactggtacctggattttttggcccctgcaaaggctactctgggagagacccacagactcttccccaataccatgctgtttgcatcagaagcctgcgtggggagcaaattctgggagcagtctgttaggctgggttcctgggatcggggcatgcaatattcccatagtataataactaacctcctctaccacgtggtaggatggacagactggaatctggctttgaacccagaaggaggccccaattgggtgcgcaactttgttgacagccccatcattgtggatatcacaaaggacaccttctacaaacagcctatgttctatcatctggggcactttagcaagttcattccagagggttcccagagagtaggcttggttgcctcacagaagaatgatctggatgctgtggcactcctgcatcctgacgggagtgcagtggtggtagtactgaacaggtctagcaaagatgttcccttgactatcaaagacccagctgtgggctttctggaaaccatttcccctggatactctatccacacctatctctggagaagacagtaatga

SEQ ID NO: 788 - protein, 536 aa, synthetic construct
  REGION 1..536: note = Variant of B-Glucocerebrosidase
MEFSSPSREECPKPLSRVSIMAGSLTGLLLLQAVSWASGARPCIPKSFGYSSVVCVCNATYCDSFDPPTLPALGTFSRYESTRSGRRMELSMGPIQANHTGTGLLLTLQPEQKFQKVKGFGGAMTDAAALNILALSPPAQNLLLKSYFSEEGIGYNIIRVPMASCDFSIRTYTYADTPDDFQLHNFSLPEEDTKLKIPLIHRALQLSQRPVSLFASPWTSPTWLKTNGAVNGKGSLKGQPGDIYHQTWARYFVKFLDAYAEHKLQFWAVTAENEPSAGLLSGYPFQCLGFTPEHQRDFIARDLGPTLANSTHHNVRLLMLDDQRLLLPHWAKVVLRDPEAAKYVHGIAVHWYLDFLAPAKATLGETHRLFPNTMLFASEACVGSKFWEQSVRLGSWDRGMQYSHSIITNLLYHVVGWTDWNLALNPEGGPNWVRNFVDSPIIVDITKDTFYKQPMFYHLGHFSKFIPEGSQRVGLVASQKNDLDAVALLHPDGSAVVVVLNRSSKDVPLTIKDPAVGFLETISPGYSIHTYLWRRQ

SEQ ID NO: 789 - DNA, 1614 bp, synthetic construct
  misc_feature 1..1614: note = Variant of B-Glucocerebrosidase
  source 1..1614: mol_type = other DNA
atggagttttcttctcctagtagagaagaatgccccaagccactgagcagggtgagcatcatggctggatccctcacagggctgcttcttttgcaggcagtctcatgggcctctggagccaggccctgtattcccaagtcattcggctactcctcagtggtgtgtgtatgcaatgccacctattgtgacagtttcgatcctccaactctccctgctctgggtaccttctcccggtatgagagcacaagaagtggaagacgcatggagctctcaatgggccctatacaggctaaccacactgggacaggtctgctgctgaccctccaacctgaacagaagtttcagaaagtcaagggatttggaggagccatgactgatgcagcagcactcaacatcttggccctgtctccaccagcccagaatctgctgttgaagtcctacttctcagaggaggggattggctacaacatcatccgggttcccatggctagctgtgacttctccattaggacctatacatacgctgacacccccgatgattttcagctccataatttcagtctccctgaagaagacaccaaactgaagatacctctgattcacagagccttgcaactgtcccaaaggccagtgagcctcttcgcttctccctggactagtcctacatggctgaagactaatggtgctgttaatgggaaaggctccctgaaaggacagccaggtgaccggtatcatcagacatgggcccgctactttgtgaaattccttgatgcctatgcagagcacaagctccaattctgggcagtcaccgcagaaaacgagccctcagctgggctgctgtctggctacccctttcagtgcttgggctttactcctgagcatcaacgggacttcattgcccgggatttggggccaacactggccaacagcacccaccacaatgtaagactcctcatgctggatgaccagaggctgctgctccctcattgggccaaggtggtgttgacagacccagaagctgccaaatatgttcatggcatcgctgtccactggtacctggattttttggcccctgcaaaggctactctgggagagacccacagactcttccccaataccatgctgtttgcatcagaagcctgcgtggggagcaaattctgggagcagtctgttaggctgggttcctgggatcggggcatgcaatattcccatagtataataactaacctcctctaccacgtggtaggatggacagactggaatctggctttgaacccagaaggaggccccaattgggtgcgcaactttgttgacagccccatcattgtggatatcacaaaggacaccttctacaaacagcctatgttctatcatctggggcactttagcaagttcattccagagggttcccagagagtaggcttggttgcctcacagaagaatgatctggatgctgtggcactcctgcatcctgacgggagtgcagtggtggtagtactgaacaggtctagcaaagatgttcccttgactatcaaagacccagctgtgggctttctggaaaccatttcccctggatactctatccacacctatctctggagaagacagtaatga

SEQ ID NO: 790 - protein, 536 aa, synthetic construct
  REGION 1..536: note = Variant of B-Glucocerebrosidase
MEFSSPSREECPKPLSRVSIMAGSLTGLLLLQAVSWASGARPCIPKSFGYSSVVCVCNATYCDSFDPPTLPALGTFSRYESTRSGRRMELSMGPIQANHTGTGLLLTLQPEQKFQKVKGFGGAMTDAAALNILALSPPAQNLLLKSYFSEEGIGYNIIRVPMASCDFSIRTYTYADTPDDFQLHNFSLPEEDTKLKIPLIHRALQLSQRPVSLFASPWTSPTWLKTNGAVNGKGSLKGQPGDRYHQTWARYFVKFLDAYAEHKLQFWAVTAENEPSAGLLSGYPFQCLGFTPEHQRDFIARDLGPTLANSTHHNVRLLMLDDQRLLLPHWAKVVLTDPEAAKYVHGIAVHWYLDFLAPAKATLGETHRLFPNTMLFASEACVGSKFWEQSVRLGSWDRGMQYSHSIITNLLYHVVGWTDWNLALNPEGGPNWVRNFVDSPIIVDITKDTFYKQPMFYHLGHFSKFIPEGSQRVGLVASQKNDLDAVALLHPDGSAVVVVLNRSSKDVPLTIKDPAVGFLETISPGYSIHTYLWRRQ

SEQ ID NO: 791 - DNA, 1614 bp, synthetic construct
  misc_feature 1..1614: note = Variant of B-Glucocerebrosidase
  source 1..1614: mol_type = other DNA
atggagttttcttctcctagtagagaagaatgccccaagccactgagcagggtgagcatcatggctggatccctcacagggctgcttcttttgcaggcagtctcatgggcctctggagccaggccctgtattcccaagtcattcggctactcctcagtggtgtgtgtatgcaatgccacctattgtgacagtttcgatcctccaactctccctgctctgggtaccttctcccggtatgagagcacaagaagtggaagacgcatggagctctcaatgggccctatacaggctaaccacactgggacaggtctgctgctgaccctccaacctgaacagaagtttcaggttgtcaagggatttggaggagccatgactgatgcagcagcactcaacatcttggccctgtctccaccagcccagaatctgctgttgaagtcctacttctcagaggaggggattggctacaacatcatccgggttcccatggctagctgtgacttctccattaggacctatacatacgctgacacccccgatgattttcagctccataatttcagtctccctgaagaagacaccaaactgaagatacctctgattcacagagccttgcaactgtcccaaaggccagtgagcctcttcgcttctccctggactagtcctacatggctgaagactaatggtgctgttaatgggaaaggctccctgaaaggacagccaggtgacatatatcatcagacatgggcccgctactttgtgaaattccttgatgcctatgcagagcacaagctccaattctgggcagtcaccgcagaaaacgagccctcagctgggctgctgtctggctacccctttcagtgcttgggctttactcctgagcatcaacgggacttcattgcccgggatttggggccaacactggccaacagcacccaccacaatgtaagactcctcatgctggatgaccagaggctgctgctccctcattgggccaaggtggtgttgacagacccagaagctgccaaatatgttcatggcatcgctgtccactggtacctggattttttggcccctgcaaaggctactctgggagagacccacagactcttccccaataccatgctgtttgcatcagaagcctgcgtggggagcaaattctgggagcagtctgttaggctgggttcctgggatcggggcatgcaatattcccatagtataataactaacctcctctaccacgtggtaggatggacagactggaatctggctttgaacccagaaggaggccccaattgggtgcgcaactttgttgacagccccatcattgtggatatcacaaaggacaccttctacaaacagcctatgttctatcatctggggcactttagcaagttcattccagagggttcccagagagtaggcttggttgcctcacagaagaatgatctggatgctgtggcactcctgcatcctgacgggagtgcagtggtggtagtactgaacaggtctagcaaagatgttcccttgactatcaaagacccagctgtgggctttctggaaaccatttcccctggatactctatccacacctatctctggagaagacagtaatga

SEQ ID NO: 792 - protein, 536 aa, synthetic construct
  REGION 1..536: note = Variant of B-Glucocerebrosidase
MEFSSPSREECPKPLSRVSIMAGSLTGLLLLQAVSWASGARPCIPKSFGYSSVVCVCNATYCDSFDPPTLPALGTFSRYESTRSGRRMELSMGPIQANHTGTGLLLTLQPEQKFQVVKGFGGAMTDAAALNILALSPPAQNLLLKSYFSEEGIGYNIIRVPMASCDFSIRTYTYADTPDDFQLHNFSLPEEDTKLKIPLIHRALQLSQRPVSLFASPWTSPTWLKTNGAVNGKGSLKGQPGDIYHQTWARYFVKFLDAYAEHKLQFWAVTAENEPSAGLLSGYPFQCLGFTPEHQRDFIARDLGPTLANSTHHNVRLLMLDDQRLLLPHWAKVVLTDPEAAKYVHGIAVHWYLDFLAPAKATLGETHRLFPNTMLFASEACVGSKFWEQSVRLGSWDRGMQYSHSIITNLLYHVVGWTDWNLALNPEGGPNWVRNFVDSPIIVDITKDTFYKQPMFYHLGHFSKFIPEGSQRVGLVASQKNDLDAVALLHPDGSAVVVVLNRSSKDVPLTIKDPAVGFLETISPGYSIHTYLWRRQ

SEQ ID NO: 793 - DNA, 1614 bp, synthetic construct
  misc_feature 1..1614: note = Variant of B-Glucocerebrosidase
  source 1..1614: mol_type = other DNA
atggagttttcttctcctagtagagaagaatgccccaagccactgagcagggtgagcatcatggctggatccctcacagggctgcttcttttgcaggcagtctcatgggcctctggagccaggccctgtattcccaagtcattcggctactcctcagtggtgtgtgtatgcaatgccacctattgtgacagtttcgatcctccaactctccctgctctgggtaccttctcccggtatgagagcacaagaagtggaagacgcatggagctctcaatgggccctatacaggctaaccacactgggacaggtctgctgctgaccctccaacctgaacagaagtttcagaaagtcaagggatttggaggagccatgactgatgcagcagcactcaacatcttggccctgtctccaccagcccagaatctgctgttgaagtcctacttctcagaggaggggattggctacaacatcatccgggttcccatggctagctgtgacttctccattaggacctatacatacgctgacacccccgatgattttcagctccataatttcagtctccctgaagaagacaccaaactgaagatacctctgattcacagagccttgcaactgtcccaaaggccagtgagcctcttcgcttctccctggactagtcctacatggctgaagactaatggtgctgttaatgggaaaggctccctgaaaggacagccaggtgacatatatcatcagacatgggcccgctactttgtgaaattccttgatgcctatgcagagcacaagctccaattctgggcagtcaccgcagaaaacgagccctcagctgggctgctgtctggctacccctttcagtgcttgggctttactcctgagcatcaacgggacttcattgcccgggatttggggccaacactggccaacagcacccaccacaatgtaagactcctcatgctggatgaccagaggctgctgctccctcattgggccaaggtggtgttgacagacccagaagctgccaaatatgttcatggcatcgctgtccactggtacctggattttttggcccctgcaaaggctactctgggagagacccacagactcttccccaataccatgctgtttgcatcagaagcctgcgtggggagcaaattctgggagcagtctgttaggctgggttcctgggatcggggcatgcaatattcccatagtataataactaacctcctctaccacgtggtaggatggacagactggaatctggctttgaacccagaaggaggccccaattgggtgcgcaactttgttgacagccccatcattgtggatatcacaaaggacaccttctacaaacagcctatgttctatcatctggggcactttagcaagttcattccagagggttcccagagagtaggcttggttgcctcacagaagaatgatctggatgctgtggcactcctgcatcctgacgggagtgcagtggtggtagtactgaacaggtctagcaaagatgttcccttgactatcaaagacccagctgtgggctttctggaaaccatttcccctggatactctatccacacctatctctggagaagaaggtaatga

SEQ ID NO: 794 - protein, 536 aa, synthetic construct
  REGION 1..536: note = Variant of B-Glucocerebrosidase
MEFSSPSREECPKPLSRVSIMAGSLTGLLLLQAVSWASGARPCIPKSFGYSSVVCVCNATYCDSFDPPTLPALGTFSRYESTRSGRRMELSMGPIQANHTGTGLLLTLQPEQKFQKVKGFGGAMTDAAALNILALSPPAQNLLLKSYFSEEGIGYNIIRVPMASCDFSIRTYTYADTPDDFQLHNFSLPEEDTKLKIPLIHRALQLSQRPVSLFASPWTSPTWLKTNGAVNGKGSLKGQPGDIYHQTWARYFVKFLDAYAEHKLQFWAVTAENEPSAGLLSGYPFQCLGFTPEHQRDFIARDLGPTLANSTHHNVRLLMLDDQRLLLPHWAKVVLTDPEAAKYVHGIAVHWYLDFLAPAKATLGETHRLFPNTMLFASEACVGSKFWEQSVRLGSWDRGMQYSHSIITNLLYHVVGWTDWNLALNPEGGPNWVRNFVDSPIIVDITKDTFYKQPMFYHLGHFSKFIPEGSQRVGLVASQKNDLDAVALLHPDGSAVVVVLNRSSKDVPLTIKDPAVGFLETISPGYSIHTYLWRRR

SEQ ID NO: 795 - DNA, 1614 bp, synthetic construct
  misc_feature 1..1614: note = Variant of B-Glucocerebrosidase
  source 1..1614: mol_type = other DNA
atggagttttcttctcctagtagagaagaatgccccaagccactgagcagggtgagcatcatggctggatccctcacagggctgcttcttttgcaggcagtctcatgggcctctggagccaggccctgtattcccaagtcattcggctactcctcagtggtgtgtgtatgcaatgccacctattgtgacagtttcgatcctccaactctccctgctctgggtaccttctcccggtatgagagcacaagaagtggaagacgcatggagctctcaatgggccctatacaggctaaccacactgggacaggtctgctgctgaccctccaacctgaacagaagtttcagaaagtcaagggatttggaggagccatgactgatgcagcagcactcaacatcttggccctgtctccaccagcccagaatctgctgttgaagtcctacttctcagaggaggggattggctacaacatcatccgggttcccatggctagctgtgacttctccattaggacctatacatacgctgacacccccgatgattttcagctccataatttcagtctccctgaagaagacaccaaactgaagatacctctgattcacagagccttgcaactgtcccaaaggccagtgagcctcttcgcttctccctggactagtcctacatggctgaagactaatggtgctgttaatgggaaaggctccctgaaaggacagccaggtgacatatatcatcagacatgggcccgctactttgtgaaattccttgatgcctatgcagagcacaagctccaattctgggcagtcaccgcagaaaacgagccctcagctgggctgctgtctggctacccctttcagtgcttgggctttactcctgagcatcaacgggacttcattgcccgggatttggggccaacactggccaacagcacccaccacaatgtaagactcctcatgctggatgaccagaggctgctgctccctcattgggccaaggtggtgttgacagacccagaagctgccaaatatgttcatggcatcgctgtccactggtacctggattttttggcccctgcaaaggctactctgggagagacccacagactcttccccaataccatgctgtttgcatcagaagcctgcgtggggagcaaattctgggagcagtctgttaggctgggttcctgggatcggggcatgcaatattcccatagtataataactaacctcctctaccacgtggtaggatggacagactggaatctggctttgaacccagaaggaggccccaattgggtgcgcaactttgttgacagccccatcattgtggatatcacaaaggacaccttctacaaacagcctatgttctatcatctggggcactttagcaagttcattccagagggttcccagagagtaggcttggttgcctcacagaagaatgatctggatgctgtggcactcctgcatcctgacgggagtgcagtggtggtagtactgaacaggtctagcaaagatgttcccttgactatcaaagacccagctgtgggctttctggaaaccgtttcccctggatactctatccacacctatctctggagaagacagtaatga

SEQ ID NO: 796 - protein, 536 aa, synthetic construct
  REGION 1..536: note = Variant of B-Glucocerebrosidase
MEFSSPSREECPKPLSRVSIMAGSLTGLLLLQAVSWASGARPCIPKSFGYSSVVCVCNATYCDSFDPPTLPALGTFSRYESTRSGRRMELSMGPIQANHTGTGLLLTLQPEQKFQKVKGFGGAMTDAAALNILALSPPAQNLLLKSYFSEEGIGYNIIRVPMASCDFSIRTYTYADTPDDFQLHNFSLPEEDTKLKIPLIHRALQLSQRPVSLFASPWTSPTWLKTNGAVNGKGSLKGQPGDIYHQTWARYFVKFLDAYAEHKLQFWAVTAENEPSAGLLSGYPFQCLGFTPEHQRDFIARDLGPTLANSTHHNVRLLMLDDQRLLLPHWAKVVLTDPEAAKYVHGIAVHWYLDFLAPAKATLGETHRLFPNTMLFASEACVGSKFWEQSVRLGSWDRGMQYSHSIITNLLYHVVGWTDWNLALNPEGGPNWVRNFVDSPIIVDITKDTFYKQPMFYHLGHFSKFIPEGSQRVGLVASQKNDLDAVALLHPDGSAVVVVLNRSSKDVPLTIKDPAVGFLETVSPGYSIHTYLWRRQ

SEQ ID NO: 797 - DNA, 1614 bp, synthetic construct
  misc_feature 1..1614: note = Variant of B-Glucocerebrosidase
  source 1..1614: mol_type = other DNA
atggagttttcttctcctagtagagaagaatgccccaagccactgagcagggtgagcatcatggctggatccctcacagggctgcttcttttgcaggcagtctcatgggcctctggagccaggccctgtattcccaagtcattcggctactcctcagtggtgtgtgtatgcaatgccacctattgtgacagtttcgatcctccaactctccctgctctgggtaccttctcccggtatgagagcacaagaagtggaagacgcatggagctctcaatgggcccaatacaggctaaccacactgggtctggtctgctgctgaccctccaacctgaacagaagtttcagaaagtcaagggatttggaggagccatgactgatgcagcagcactcaacatcttggccctgtctccaccagcccagaatctgctgttgaagtcctacttctcagaggaggggattggctacaacatcatccgggttcccatggctagctgtgacttctccattaggacctatacatacgctgacacccccgatgattttcagctccataatttcagtctccctgaagaagacaccaaactgaagatacctctgattcacagagccttgcaactgtcccaaaggccagtgagcctcttcgcttctccctggactagtcctacatggctgaagactaatggtgctgttaatgggaaaggctccctgaaaggacagccaggtgacatatatcatcagacatgggcccgctactttgtgaaattccttgatgcctatgcagagcacaagctccaattctgggcagtcaccgcagaaaacgagccctcagctgggctgctgtctggctacccctttcagtgcttgggctttactcctgagcatcaacgggacttcattgcccgggatttggggccaacactggccaacagcacccaccacaatgtaagactcctcatgctggatgaccagaggctgctgctccctcattgggccaaggtggtgttgacagacccagaagctgccaaatatgttcatggcatcgctgtccactggtacctggattttttggcccctgcaaaggctactctgggagagacccacagactcttccccaataccatgctgtttgcatcagaagcctgcgtggggagcaaattctgggagcagtctgttaggctgggttcctgggatcggggcatgcaatattcccatagtataataactaacctcctctaccacgtggtaggatggacagactggaatctggctttgaacccagaaggaggccccaattgggtgcgcaactttgttgacagccccatcattgtggatatcacaaaggacaccttctacaaacagcctatgttctatcatctggggcactttagcaagttcattccagagggttcccagagagtaggcttggttgcctcacagaagaatgatctggatgctgtggcactcctgcatcctgacgggagtgcagtggtggtagtactgaacaggtctagcaaagatgttcccttgactatcaaagacccagctgtgggctttctggaaaccatttcccctggatactctatccacacctatctctggagaagacagtaatga

SEQ ID NO: 798 - protein, 536 aa, synthetic construct
  REGION 1..536: note = Variant of B-Glucocerebrosidase
MEFSSPSREECPKPLSRVSIMAGSLTGLLLLQAVSWASGARPCIPKSFGYSSVVCVCNATYCDSFDPPTLPALGTFSRYESTRSGRRMELSMGPIQANHTGSGLLLTLQPEQKFQKVKGFGGAMTDAAALNILALSPPAQNLLLKSYFSEEGIGYNIIRVPMASCDFSIRTYTYADTPDDFQLHNFSLPEEDTKLKIPLIHRALQLSQRPVSLFASPWTSPTWLKTNGAVNGKGSLKGQPGDIYHQTWARYFVKFLDAYAEHKLQFWAVTAENEPSAGLLSGYPFQCLGFTPEHQRDFIARDLGPTLANSTHHNVRLLMLDDQRLLLPHWAKVVLTDPEAAKYVHGIAVHWYLDFLAPAKATLGETHRLFPNTMLFASEACVGSKFWEQSVRLGSWDRGMQYSHSIITNLLYHVVGWTDWNLALNPEGGPNWVRNFVDSPIIVDITKDTFYKQPMFYHLGHFSKFIPEGSQRVGLVASQKNDLDAVALLHPDGSAVVVVLNRSSKDVPLTIKDPAVGFLETISPGYSIHTYLWRRQ

SEQ ID NO: 799 - DNA, 1614 bp, synthetic construct
  misc_feature 1..1614: note = Variant of B-Glucocerebrosidase
  source 1..1614: mol_type = other DNA
atggagttttcttctcctagtagagaagaatgccccaagccactgagcagggtgagcatcatggctggatccctcacagggctgcttcttttgcaggcagtctcatgggcctctggagccaggccctgtattcccaagtcattcggctactcctcagtggtgtgtgtatgcaatgccacctattgtgacagtttcgatcctccaactctccctgctctgggtaccttctcccggtatgagagcacaagaagtggaagacgcatggagctctcaatgggcccaatacagaggaaccacactgggacaggtctgctgctgaccctccaacctgaacagaagtttcagaaagtcaagggatttggaggagccatgactgatgcagcagcactcaacatcttggccctgtctccaccagcccagaatctgctgttgaagtcctacttctcagaggaggggattggctacaacatcatccgggttcccatggctagctgtgacttctccattaggacctatacatacgctgacacccccgatgattttcagctccataatttcagtctccctgaagaagacaccaaactgaagatacctctgattcacagagccttgcaactgtcccaaaggccagtgagcctcttcgcttctccctggactagtcctacatggctgaagactaatggtgctgttaatgggaaaggctccctgaaaggacagccaggtgacatatatcatcagacatgggcccgctactttgtgaaattccttgatgcctatgcagagcacaagctccaattctgggcagtcaccgcagaaaacgagccctcagctgggctgctgtctggctacccctttcagtgcttgggctttactcctgagcatcaacgggacttcattgcccgggatttggggccaacactggccaacagcacccaccacaatgtaagactcctcatgctggatgaccagaggctgctgctccctcattgggccaaggtggtgttgacagacccagaagctgccaaatatgttcatggcatcgctgtccactggtacctggattttttggcccctgcaaaggctactctgggagagacccacagactcttccccaataccatgctgtttgcatcagaagcctgcgtggggagcaaattctgggagcagtctgttaggctgggttcctgggatcggggcatgcaatattcccatagtataataactaacctcctctaccacgtggtaggatggacagactggaatctggctttgaacccagaaggaggccccaattgggtgcgcaactttgttgacagccccatcattgtggatatcacaaaggacaccttctacaaacagcctatgttctatcatctggggcactttagcaagttcattccagagggttcccagagagtaggcttggttgcctcacagaagaatgatctggatgctgtggcactcctgcatcctgacgggagtgcagtggtggtagtactgaacaggtctagcaaagatgttcccttgactatcaaagacccagctgtgggctttctggaaaccatttcccctggatactctatccacacctatctctggagaagacagtaatga

SEQ ID NO: 800 - protein, 536 aa, synthetic construct
  REGION 1..536: note = Variant of B-Glucocerebrosidase
MEFSSPSREECPKPLSRVSIMAGSLTGLLLLQAVSWASGARPCIPKSFGYSSVVCVCNATYCDSFDPPTLPALGTFSRYESTRSGRRMELSMGPIQRNHTGTGLLLTLQPEQKFQKVKGFGGAMTDAAALNILALSPPAQNLLLKSYFSEEGIGYNIIRVPMASCDFSIRTYTYADTPDDFQLHNFSLPEEDTKLKIPLIHRALQLSQRPVSLFASPWTSPTWLKTNGAVNGKGSLKGQPGDIYHQTWARYFVKFLDAYAEHKLQFWAVTAENEPSAGLLSGYPFQCLGFTPEHQRDFIARDLGPTLANSTHHNVRLLMLDDQRLLLPHWAKVVLTDPEAAKYVHGIAVHWYLDFLAPAKATLGETHRLFPNTMLFASEACVGSKFWEQSVRLGSWDRGMQYSHSIITNLLYHVVGWTDWNLALNPEGGPNWVRNFVDSPIIVDITKDTFYKQPMFYHLGHFSKFIPEGSQRVGLVASQKNDLDAVALLHPDGSAVVVVLNRSSKDVPLTIKDPAVGFLETISPGYSIHTYLWRRQ

SEQ ID NO: 801 - DNA, 1614 bp, synthetic construct
  misc_feature 1..1614: note = Variant of B-Glucocerebrosidase
  source 1..1614: mol_type = other DNA
atggagttttcttctcctagtagagaagaatgccccaagccactgagcagggtgagcatcatggctggatccctcacagggctgcttcttttgcaggcagtctcatgggcctctggacataggccctgtattcccaagtcattcggctactcctcagtggtgtgtgtatgcaatgccacctattgtgacagtttcgatcctccaactctccctgctctgggtaccttctcccggtatgagagcacaagaagtggaagacgcatggagctctcaatgggccctatacaggctaaccacactgggacaggtctgctgctgaccctccaacctgaacagaagtttcagaaagtcaagggatttggaggagccatgactgatgcagcagcactcaacatcttggccctgtctccaccagcccagaatctgctgttgaagtcctacttctcagaggaggggattggctacaacatcatccgggttcccatggctagctgtgacttctccattaggacctatacatacgctgacacccccgatgattttcagctccataatttcagtctccctgaagaagacaccaaactgaagatacctctgattcacagagccttgcaactgtcccaaaggccagtgagcctcttcgcttctccctggactagtcctacatggctgaagactaatggtgctgttaatgggaaaggctccctgaaaggacagccaggtgacatatatcatcagacatgggcccgctactttgtgaaattccttgatgcctatgcagagcacaagctccaattctgggcagtcaccgcagaaaacgagccctcagctgggctgctgtctggctacccctttcagtgcttgggctttactcctgagcatcaacgggacttcattgcccgggatttggggccaacactggccaacagcacccaccacaatgtaagactcctcatgctggatgaccagaggctgctgctccctcattgggccaaggtggtgttgacagacccagaagctgccaaatatgttcatggcatcgctgtccactggtacctggattttttggcccctgcaaaggctactctgggagagacccacagactcttccccaataccatgctgtttgcatcagaagcctgcgtggggagcaaattctgggagcagtctgttaggctgggttcctgggatcggggcatgcaatattcccatagtataataactaacctcctctaccacgtggtaggatggacagactggaatctggctttgaacccagaaggaggccccaattgggtgcgcaactttgttgacagccccatcattgtggatatcacaaaggacaccttctacaaacagcctatgttctatcatctggggcactttagcaagttcattccagagggttcccagagagtaggcttggttgcctcacagaagaatgatctggatgctgtggcactcctgcatcctgacgggagtgcagtggtggtagtactgaacaggtctagcaaagatgttcccttgactatcaaagacccagctgtgggctttctggaaaccatttcccctggatactctatccacacctatctctggagaagacagtaatga

SEQ ID NO: 802 - protein, 536 aa, synthetic construct
  REGION 1..536: note = Variant of B-Glucocerebrosidase
MEFSSPSREECPKPLSRVSIMAGSLTGLLLLQAVSWASGHRPCIPKSFGYSSVVCVCNATYCDSFDPPTLPALGTFSRYESTRSGRRMELSMGPIQANHTGTGLLLTLQPEQKFQKVKGFGGAMTDAAALNILALSPPAQNLLLKSYFSEEGIGYNIIRVPMASCDFSIRTYTYADTPDDFQLHNFSLPEEDTKLKIPLIHRALQLSQRPVSLFASPWTSPTWLKTNGAVNGKGSLKGQPGDIYHQTWARYFVKFLDAYAEHKLQFWAVTAENEPSAGLLSGYPFQCLGFTPEHQRDFIARDLGPTLANSTHHNVRLLMLDDQRLLLPHWAKVVLTDPEAAKYVHGIAVHWYLDFLAPAKATLGETHRLFPNTMLFASEACVGSKFWEQSVRLGSWDRGMQYSHSIITNLLYHVVGWTDWNLALNPEGGPNWVRNFVDSPIIVDITKDTFYKQPMFYHLGHFSKFIPEGSQRVGLVASQKNDLDAVALLHPDGSAVVVVLNRSSKDVPLTIKDPAVGFLETISPGYSIHTYLWRRQ

SEQ ID NO: 803 - DNA, 1614 bp, synthetic construct
  misc_feature 1..1614: note = Variant of B-Glucocerebrosidase
  source 1..1614: mol_type = other DNA
atggagttttcttctcctagtagagaagaatgccccaagccactgagcagggtgagcatcatggctggatccctcacagggctgcttcttttgcaggcagtctcatgggcctctggagccaggccctgtattcccaagtcattcggctactcctcagtggtgtgtgtatgcaatgccacctattgtgacagtttcgatcctccaactctccctgctctgggtaccttctcccggtatgagagcacaagaagtggaagacgcatggagctctcaatgggccctatacaggctaaccacactgggacaggtctgctgctgaccctccaacctgaacagaagtttcagaaagtcaagggatttggaggagccatgactgatgcagcagcactcaacatcttggccctgtctccaccagcccagaatctgctgttgaagtcctacttctcagaggaggggattggctacaacatcatccgggttcccatggctagctgtgacttctccattaggacctatacatacgctgacacccccgatgattttcagctccataatttcagtctccctgaagaagacaccaaactgaagatacctctgattcacagagccttgcaactgtcccaaaggccagtgagcctcttcgcttctccctggactagtcctacatggctgaagactaatggtgctgttaatgggaaaggctccctgaaaggacagccaggtgacgtttatcatcagacatgggcccgctactttgtgaaattccttgatgcctatgcagagcacaagctccaattctgggcagtcaccgcagaaaacgagccctcagctgggctgctgtctggctacccctttcagtgcttgggctttactcctgagcatcaacgggacttcattgcccgggatttggggccaacactggccaacagcacccaccacaatgtaagactcctcatgctggatgaccagaggctgctgctccctcattgggccaaggtggtgttgacagacccagaagctgccaaatatgttcatggcatcgctgtccactggtacctggattttttggcccctgcaaaggctactctgggagagacccacagactcttccccaataccatgctgtttgcatcagaagcctgcgtggggagcaaattctgggagcagtctgttaggctgggttcctgggatcggggcatgcaatattcccatagtataataactaacctcctctaccacgtggtaggatggacagactggaatctggctttgaacccagaaggaggccccaattgggtgcgcaactttgttgacagccccatcattgtggatatcacaaaggacaccttctacaaacagcctatgttctatcatctggggcactttagcaagttcattccagagggttcccagagagtaggcttggttgcctcacagaagaatgatctggatgctgtggcactcctgcatcctgacgggagtgcagtggtggtagtactgaacaggtctagcaaagatgttcccttgactatcaaagacccagctgtgggctttctggaaaccatttcccctggatactctatccacacctatctctggagaagacagtaatga

SEQ ID NO: 804 - protein, 536 aa, synthetic construct
  REGION 1..536: note = Variant of B-Glucocerebrosidase
MEFSSPSREECPKPLSRVSIMAGSLTGLLLLQAVSWASGARPCIPKSFGYSSVVCVCNATYCDSFDPPTLPALGTFSRYESTRSGRRMELSMGPIQANHTGTGLLLTLQPEQKFQKVKGFGGAMTDAAALNILALSPPAQNLLLKSYFSEEGIGYNIIRVPMASCDFSIRTYTYADTPDDFQLHNFSLPEEDTKLKIPLIHRALQLSQRPVSLFASPWTSPTWLKTNGAVNGKGSLKGQPGDVYHQTWARYFVKFLDAYAEHKLQFWAVTAENEPSAGLLSGYPFQCLGFTPEHQRDFIARDLGPTLANSTHHNVRLLMLDDQRLLLPHWAKVVLTDPEAAKYVHGIAVHWYLDFLAPAKATLGETHRLFPNTMLFASEACVGSKFWEQSVRLGSWDRGMQYSHSIITNLLYHVVGWTDWNLALNPEGGPNWVRNFVDSPIIVDITKDTFYKQPMFYHLGHFSKFIPEGSQRVGLVASQKNDLDAVALLHPDGSAVVVVLNRSSKDVPLTIKDPAVGFLETISPGYSIHTYLWRRQ

SEQ ID NO: 805 - DNA, 1614 bp, synthetic construct
  misc_feature 1..1614: note = Variant of B-Glucocerebrosidase
  source 1..1614: mol_type = other DNA
atggagttttcttctcctagtagagaagaatgccccaagccactgagcagggtgagcatcatggctggatccctcacagggctgcttcttttgcaggcagtctcatgggcctctggagccaggccctgtattcccaagtcattcggctactcctcagtggtgtgtgtatgcaatgccacctattgtgacagtttcgatcctccaactctccctgctctgggtaccttctcccggtatgagagcacaagaagtggaagacgcatggagctctcaatgggccctatacaggctaaccacactgggacaggtctgctgctgaccctccaacctgaacagaagtttcagaaagtcaagggatttggaggagccatgactgatgcagcagcactcaacatcttggccctgtctccaccagcccagaatctgctgttgaagtcctacttctcagaggaggggattggctacaacatcatccgggttcccatggctagctgtgacttctccattaggacctatacatacgctgacacccccgatgattttcagctccataatttcagtctccctgaagaagacaccaaactgaagatacctctgattcacagagccttgcaactgtcccaaaggccagtgagcctcttcgcttctccctggactagtcctacatggctgaagactaatggtgctgttaatgggaaaggctccctgaaaggacagccaggtgacatatatcatcagacatgggcccgctactttgtgaaattccttgatgcctatgcagagcacaagctcagtttctgggcagtcaccgcagaaaacgagccctcagctgggctgctgtctggctacccctttcagtgcttgggctttactcctgagcatcaacgggacttcattgcccgggatttggggccaacactggccaacagcacccaccacaatgtaagactcctcatgctggatgaccagaggctgctgctccctcattgggccaaggtggtgttgacagacccagaagctgccaaatatgttcatggcatcgctgtccactggtacctggattttttggcccctgcaaaggctactctgggagagacccacagactcttccccaataccatgctgtttgcatcagaagcctgcgtggggagcaaattctgggagcagtctgttaggctgggttcctgggatcggggcatgcaatattcccatagtataataactaacctcctctaccacgtggtaggatggacagactggaatctggctttgaacccagaaggaggccccaattgggtgcgcaactttgttgacagccccatcattgtggatatcacaaaggacaccttctacaaacagcctatgttctatcatctggggcactttagcaagttcattccagagggttcccagagagtaggcttggttgcctcacagaagaatgatctggatgctgtggcactcctgcatcctgacgggagtgcagtggtggtagtactgaacaggtctagcaaagatgttcccttgactatcaaagacccagctgtgggctttctggaaaccatttcccctggatactctatccacacctatctctggagaagacagtaatga

SEQ ID NO: 806 - protein, 536 aa, synthetic construct
  REGION 1..536: note = Variant of B-Glucocerebrosidase
MEFSSPSREECPKPLSRVSIMAGSLTGLLLLQAVSWASGARPCIPKSFGYSSVVCVCNATYCDSFDPPTLPALGTFSRYESTRSGRRMELSMGPIQANHTGTGLLLTLQPEQKFQKVKGFGGAMTDAAALNILALSPPAQNLLLKSYFSEEGIGYNIIRVPMASCDFSIRTYTYADTPDDFQLHNFSLPEEDTKLKIPLIHRALQLSQRPVSLFASPWTSPTWLKTNGAVNGKGSLKGQPGDIYHQTWARYFVKFLDAYAEHKLSFWAVTAENEPSAGLLSGYPFQCLGFTPEHQRDFIARDLGPTLANSTHHNVRLLMLDDQRLLLPHWAKVVLTDPEAAKYVHGIAVHWYLDFLAPAKATLGETHRLFPNTMLFASEACVGSKFWEQSVRLGSWDRGMQYSHSIITNLLYHVVGWTDWNLALNPEGGPNWVRNFVDSPIIVDITKDTFYKQPMFYHLGHFSKFIPEGSQRVGLVASQKNDLDAVALLHPDGSAVVVVLNRSSKDVPLTIKDPAVGFLETISPGYSIHTYLWRRQ

SEQ ID NO: 807 - DNA, 1614 bp, synthetic construct
  misc_feature 1..1614: note = Variant of B-Glucocerebrosidase
  source 1..1614: mol_type = other DNA
atggagttttcttctcctagtagagaagaatgccccaagccactgagcagggtgagcatcatggctggatccctcacagggctgcttcttttgcaggcagtctcatgggcctctggagccaggccctgtattcccaagtcattcggctactcctcagtggtgtgtgtatgcaatgccacctattgtgacagtttcgatcctccaactctccctgctctgggtaccttctcccggtatgagagcacaagaagtggaagacgcatggagctctcaatgggccctatacaggctaaccacactgggacaggtctgctgctgaccctccaacctgaacagaagtttcagcaggtcaagggatttggaggagccatgactgatgcagcagcactcaacatcttggccctgtctccaccagcccagaatctgctgttgaagtcctacttctcagaggaggggattggctacaacatcatccgggttcccatggctagctgtgacttctccattaggacctatacatacgctgacacccccgatgattttcagctccataatttcagtctccctgaagaagacaccaaactgaagatacctctgattcacagagccttgcaactgtcccaaaggccagtgagcctcttcgcttctccctggactagtcctacatggctgaagactaatggtgctgttaatgggaaaggctccctgaaaggacagccaggtgacatatatcatcagacatgggcccgctactttgtgaaattccttgatgcctatgcagagcacaagctccaattctgggcagtcaccgcagaaaacgagccctcagctgggctgctgtctggctacccctttcagtgcttgggctttactcctgagcatcaacgggacttcattgcccgggatttggggccaacactggccaacagcacccaccacaatgtaagactcctcatgctggatgaccagaggctgctgctccctcattgggccaaggtggtgttgacagacccagaagctgccaaatatgttcatggcatcgctgtccactggtacctggattttttggcccctgcaaaggctactctgggagagacccacagactcttccccaataccatgctgtttgcatcagaagcctgcgtggggagcaaattctgggagcagtctgttaggctgggttcctgggatcggggcatgcaatattcccatagtataataactaacctcctctaccacgtggtaggatggacagactggaatctggctttgaacccagaaggaggccccaattgggtgcgcaactttgttgacagccccatcattgtggatatcacaaaggacaccttctacaaacagcctatgttctatcatctggggcactttagcaagttcattccagagggttcccagagagtaggcttggttgcctcacagaagaatgatctggatgctgtggcactcctgcatcctgacgggagtgcagtggtggtagtactgaacaggtctagcaaagatgttcccttgactatcaaagacccagctgtgggctttctggaaaccatttcccctggatactctatccacacctatctctggagaagacagtaatga

SEQ ID NO: 808 - protein, 536 aa, synthetic construct
  REGION 1..536: note = Variant of B-Glucocerebrosidase
MEFSSPSREECPKPLSRVSIMAGSLTGLLLLQAVSWASGARPCIPKSFGYSSVVCVCNATYCDSFDPPTLPALGTFSRYESTRSGRRMELSMGPIQANHTGTGLLLTLQPEQKFQQVKGFGGAMTDAAALNILALSPPAQNLLLKSYFSEEGIGYNIIRVPMASCDFSIRTYTYADTPDDFQLHNFSLPEEDTKLKIPLIHRALQLSQRPVSLFASPWTSPTWLKTNGAVNGKGSLKGQPGDIYHQTWARYFVKFLDAYAEHKLQFWAVTAENEPSAGLLSGYPFQCLGFTPEHQRDFIARDLGPTLANSTHHNVRLLMLDDQRLLLPHWAKVVLTDPEAAKYVHGIAVHWYLDFLAPAKATLGETHRLFPNTMLFASEACVGSKFWEQSVRLGSWDRGMQYSHSIITNLLYHVVGWTDWNLALNPEGGPNWVRNFVDSPIIVDITKDTFYKQPMFYHLGHFSKFIPEGSQRVGLVASQKNDLDAVALLHPDGSAVVVVLNRSSKDVPLTIKDPAVGFLETISPGYSIHTYLWRRQ

SEQ ID NO: 809 - DNA, 1614 bp, synthetic construct
  misc_feature 1..1614: note = Variant of B-Glucocerebrosidase
  source 1..1614: mol_type = other DNA
atggagttttcttctcctagtagagaagaatgccccaagccactgagcagggtgagcatcatggctggatccctcacagggctgcttcttttgcaggcagtctcatgggcctctggagccaggccctgtattcccaagtcattcggctactcctcagtggtgtgtgtatgcaatgccacctattgtgacagtttcgatcctccaactctccctgctctgggtaccttctcccggtatgagagcacaagaagtggaagacgcatggagctctcaatgggccctatacaggctaaccacactgggacaggtctgctgctgaccctccaacctgaacagaagtttcagaaagtcaagggatttggaggagccatgactgatgcagcagcactcaacatcttggccctgtctccaccagcccagaatctgctgttgaagtcctacttctcagaggaggggattggctacaacatcatccgggttcccatggctagctgtgacttctccattaggacctatacatacgctgacacccccgatgattttcagctccataatttcagtctccctgaagaagacaccaaactgaagatacctctgattcacagagccttgcaactgtcccaaaggccagtgagcctcttcgcttctccctggactagtcctacatggctgaagactaatggtgctgttaatgggaaaggctccctgaaaggacagccaggtgacatatatcatcagacatgggcccgctactttgtgaaattccttgatgcctatgcagagcacaagctccaattctgggcagtcaccgcagaaaacgagccctcagctgggctgctgtctggctacccctttcagtgcttgggctttactcctgagcatcaacgggacttcattgcccgggatttggggccaacactggccaacagcacccaccacaatgtaagactcctcatgctggatgaccagaggctgctgctccctcattgggccaaggtggtgttgacagacccagaagctgccaaatatgttcatggcatcgctgtccactggtacctggattttttggcccctgcaaaggctactctgggagagacccacagactcttccccaataccatgctgtttgcatcagaagcctgcgtggggagcaaattctgggagcagtctgttaggctgggttcctgggatcggggcatgcaatattcccatagtataataactaacctcctctaccacgtggtaggatggacagactggaatctggctttgaacccagaaggaggccccaattgggtgcgcaactttgttgacagccccatcattgtggatatcacaaaggacaccttctacaaacagcctatgttctatcatctggggcactttagcaagttcattccagagggttcccagagagtaggcttggttgcctcacagaagaatgatctggatgctgtggcactcctgcatcctgacgggagtgcagtggtggtagtactgaacaggtctagcaaagatgttcccttgactatcaaagacgaggctgtgggctttctggaaaccatttcccctggatactctatccacacctatctctggagaagacagtaatga

SEQ ID NO: 810 - protein, 536 aa, synthetic construct
  REGION 1..536: note = Variant of B-Glucocerebrosidase
MEFSSPSREECPKPLSRVSIMAGSLTGLLLLQAVSWASGARPCIPKSFGYSSVVCVCNATYCDSFDPPTLPALGTFSRYESTRSGRRMELSMGPIQANHTGTGLLLTLQPEQKFQKVKGFGGAMTDAAALNILALSPPAQNLLLKSYFSEEGIGYNIIRVPMASCDFSIRTYTYADTPDDFQLHNFSLPEEDTKLKIPLIHRALQLSQRPVSLFASPWTSPTWLKTNGAVNGKGSLKGQPGDIYHQTWARYFVKFLDAYAEHKLQFWAVTAENEPSAGLLSGYPFQCLGFTPEHQRDFIARDLGPTLANSTHHNVRLLMLDDQRLLLPHWAKVVLTDPEAAKYVHGIAVHWYLDFLAPAKATLGETHRLFPNTMLFASEACVGSKFWEQSVRLGSWDRGMQYSHSIITNLLYHVVGWTDWNLALNPEGGPNWVRNFVDSPIIVDITKDTFYKQPMFYHLGHFSKFIPEGSQRVGLVASQKNDLDAVALLHPDGSAVVVVLNRSSKDVPLTIKDEAVGFLETISPGYSIHTYLWRRQ

SEQ ID NO: 811 - DNA, 1614 bp, synthetic construct
  misc_feature 1..1614: note = Variant of B-Glucocerebrosidase
  source 1..1614: mol_type = other DNA
atggagttttcttctcctagtagagaagaatgccccaagccactgagcagggtgagcatcatggctggatccctcacagggctgcttcttttgcaggcagtctcatgggcctctggagccaggccctgtattcccaagtcattcggctactcctcagtggtgtgtgtatgcaatgccacctattgtgacagtttcgatcctccaactctccctgctctgggtaccttctcccggtatgagagcacaagaagtggaagacgcatggagctctcaatgggccctatacaggctaaccacactgggacaggtctgctgctgaccctccaacctgaacagaagtttcagaaagtcaagggatttggaggagccatgactgatgcagcagcactcaacatcttggccctgtctccaccagcccagaatctgctgttgaagtcctacttctcagaggaggggattggctacaacatcatccgggttcccatggctagctgtgacttctccattaggacctatacatacgctgacacccccgatgattttcagctccataatttcagtctccctgaagaagacaccaaactgaagatacctctgattcacagagccttgcaactgtcccaaaggccagtgagcctcttcgcttctccctggactagtcctacatggctgaagactaatggtgctgttaatgggaaaggctccctgaaaggacagccaggtgacatatatcatcagacatgggcccgctactttgtgaaattccttgatgcctatgcagagcacaagctccaattctgggcagtcaccgcagaaaacgagccctcagctgggctgctgtctggctacccctttcagtgcttgggctttactcctgagcatcaacgggacttcattgcccgggatttggggccaacactggccaacagcacccaccacaatgtaagactcctcatgctggatgaccagaggctgctgctccctcattgggccaaggtggtgttgacagacccagaagctgccaaatatgttcatggcatcgctgtccactggtacctggattttttggcccctgcaaaggctactctgggagagacccacagactcttccccaataccatgctgtttgcatcagaagcctgcgtggggagcaaattctgggagcagtctgttaggctgggttcctgggatcggggcatgcaatattcccatagtataataactaacctcctctaccacgtggtaggatggacagactggaatctggctttgaacccagaaggaggccccaattgggtgcgcaactttgttgacagccccatcattgtggatatcacaaaggacaccttctacaaacagcctatgttctatcatctggggcactttagcaagttcattccagagggttcccagagagtaggcttggttgcctcacagaagaatgatctggatgctgtggcactcctgcatcctgacgggagtgcagtggtggtagtactgaacaggtctagcaaagatgttctgttgactatcaaagacccagctgtgggctttctggaaaccatttcccctggatactctatccacacctatctctggagaagacagtaatga

SEQ ID NO: 812 - protein, 536 aa, synthetic construct
  REGION 1..536: note = Variant of B-Glucocerebrosidase
MEFSSPSREECPKPLSRVSIMAGSLTGLLLLQAVSWASGARPCIPKSFGYSSVVCVCNATYCDSFDPPTLPALGTFSRYESTRSGRRMELSMGPIQANHTGTGLLLTLQPEQKFQKVKGFGGAMTDAAALNILALSPPAQNLLLKSYFSEEGIGYNIIRVPMASCDFSIRTYTYADTPDDFQLHNFSLPEEDTKLKIPLIHRALQLSQRPVSLFASPWTSPTWLKTNGAVNGKGSLKGQPGDIYHQTWARYFVKFLDAYAEHKLQFWAVTAENEPSAGLLSGYPFQCLGFTPEHQRDFIARDLGPTLANSTHHNVRLLMLDDQRLLLPHWAKVVLTDPEAAKYVHGIAVHWYLDFLAPAKATLGETHRLFPNTMLFASEACVGSKFWEQSVRLGSWDRGMQYSHSIITNLLYHVVGWTDWNLALNPEGGPNWVRNFVDSPIIVDITKDTFYKQPMFYHLGHFSKFIPEGSQRVGLVASQKNDLDAVALLHPDGSAVVVVLNRSSKDVLLTIKDPAVGFLETISPGYSIHTYLWRRQ

SEQ ID NO: 813 - DNA, 1614 bp, synthetic construct
  misc_feature 1..1614: note = Variant of B-Glucocerebrosidase
  source 1..1614: mol_type = other DNA
atggagttttcttctcctagtagagaagaatgccccaagccactgagcagggtgagcatcatggctggatccctcacagggctgcttcttttgcaggcagtctcatgggcctctggagccaggccctgtattcccaagtcattcggctactcctcagtggtgtgtgtatgcaatgccacctattgtgacagtttcgatcctccaactctccctgctctgggtaccttctcccggtatgagagcacaagaagtggaagacgcatggagctctcaatgggccctatacaggctaaccacactgggacaggtctgctgctgaccctccaacctgaacagaagtttcagaaagtcaagggatttggaggagccatgactgatgcagcagcactcaacatcttggccctgtctccaccagcccagaatctgctgttgaagtcctacttctcagaggaggggattggctacaacatcatccgggttcccatggctagctgtgacttctccattaggacctatacatacgctgacacccccgatgattttcagctccataatttcagtctccctgaagaagacaccaaactgaagatacctctgattcacagagccttgcaactgtcccaaaggccagtgagcctcttcgcttctccctggactagtcctacatggctgaagactaatggtgctgttaatgggaaaggctccctgaaaggacagccaggtgacatatatcatcagacatgggcccgctactttgtgaaattccttgatgcctatgcagagcacaagctccaattctgggcagtcaccgcagaaaacgagccctcagctgggctgctgtctggctacccctttcagtgcttgggctttactcctgagcatcaacgggacttcattgcccgggatttggggccaacactggccaacagcacccaccacaatgtaagactcctcatgctggatgaccagaggctgctgctccctcattgggccaaggtggtgttgacagacccagaagctgccaaatatgttcatggcatcgctgtccactggtacctggattttttggcccctgcaaaggctactctgggagagacccacagactcttccccaataccatgctgtttgcatcagaagcctgcgtggggagcaaattctgggagcagtctgttaggctgggttcctgggatcggggcatgcaatattcccatagtataataactaacctcctctaccacgtggtaggatggacagactggaatctggctttgaacccagaaggaggccccaattgggtgcgcaactttgttgacagccccatcattgtggatatcacaaaggacaccttctacaaacagcctatgttctatcatctggggcactttagcaagttcattccagagggttcccagagagtaggcttggttgcctcacagaagaatgatctggatgctgtggcactcctgcatcctgacgggagtgcagtggtggtagtactgaacaggtctagcaaagatgttcccttgactatcaaagacccaacggtgggctttctggaaaccatttcccctggatactctatccacacctatctctggagaagacagtaatga

SEQ ID NO: 814 - protein, 536 aa, synthetic construct
  REGION 1..536: note = Variant of B-Glucocerebrosidase
MEFSSPSREECPKPLSRVSIMAGSLTGLLLLQAVSWASGARPCIPKSFGYSSVVCVCNATYCDSFDPPTLPALGTFSRYESTRSGRRMELSMGPIQANHTGTGLLLTLQPEQKFQKVKGFGGAMTDAAALNILALSPPAQNLLLKSYFSEEGIGYNIIRVPMASCDFSIRTYTYADTPDDFQLHNFSLPEEDTKLKIPLIHRALQLSQRPVSLFASPWTSPTWLKTNGAVNGKGSLKGQPGDIYHQTWARYFVKFLDAYAEHKLQFWAVTAENEPSAGLLSGYPFQCLGFTPEHQRDFIARDLGPTLANSTHHNVRLLMLDDQRLLLPHWAKVVLTDPEAAKYVHGIAVHWYLDFLAPAKATLGETHRLFPNTMLFASEACVGSKFWEQSVRLGSWDRGMQYSHSIITNLLYHVVGWTDWNLALNPEGGPNWVRNFVDSPIIVDITKDTFYKQPMFYHLGHFSKFIPEGSQRVGLVASQKNDLDAVALLHPDGSAVVVVLNRSSKDVPLTIKDPTVGFLETISPGYSIHTYLWRRQ

SEQ ID NO: 815 - DNA, 1614 bp, synthetic construct
  misc_feature 1..1614: note = Variant of B-Glucocerebrosidase
  source 1..1614: mol_type = other DNA
atggagttttcttctcctagtagagaagaatgccccaagccactgagcagggtgagcatcatggctggatccctcacagggctgcttcttttgcaggcagtctcatgggcctctggagccaggccctgtattcccaagtcattcggctactcctcagtggtgtgtgtatgcaatgccacctattgtgacagtttcgatcctccaactctccctgctctgggtaccttctcccggtatgagagcacaagaagtggaagacgcatggagctctcaatgggccctatacaggctaaccacactgggacaggtctgctgctgaccctccaacctgaacagaagtttcagaaagtcaagggatttggaggagccatgactgatgcagcagcactcaacatcttggccctgtctccaccagcccagaatctgctgttgaagtcctacttctcagaggaggggattggctacaacatcatccgggttcccatggctagctgtgacttctccattaggacctatacatacgctgacacccccgatgattttcagctccataatttcagtctccctgaagaagacaccaaactgaagatacctctgattcacagagccttgcaactgtcccaaaggccagtgagcctcttcgcttctccctggactagtcctacatggctgaagactaatggtgctgttaatgggaaaggctccctgaaaggacagccaggtgacatctatcataggacatgggcccgctactttgtgaaattccttgatgcctatgcagagcacaagctccaattctgggcagtcaccgcagaaaacgagccctcagctgggctgctgtctggctacccctttcagtgcttgggctttactcctgagcatcaacgggacttcattgcccgggatttggggccaacactggccaacagcacccaccacaatgtaagactcctcatgctggatgaccagaggctgctgctccctcattgggccaaggtggtgttgacagacccagaagctgccaaatatgttcatggcatcgctgtccactggtacctggattttttggcccctgcaaaggctactctgggagagacccacagactcttccccaataccatgctgtttgcatcagaagcctgcgtggggagcaaattctgggagcagtctgttaggctgggttcctgggatcggggcatgcaatattcccatagtataataactaacctcctctaccacgtggtaggatggacagactggaatctggctttgaacccagaaggaggccccaattgggtgcgcaactttgttgacagccccatcattgtggatatcacaaaggacaccttctacaaacagcctatgttctatcatctggggcactttagcaagttcattccagagggttcccagagagtaggcttggttgcctcacagaagaatgatctggatgctgtggcactcctgcatcctgacgggagtgcagtggtggtagtactgaacaggtctagcaaagatgttcccttgactatcaaagacccagctgtgggctttctggaaaccatttcccctggatactctatccacacctatctctggagaagacagtaatga

SEQ ID NO: 816 - protein, 536 aa, synthetic construct
  REGION 1..536: note = Variant of B-Glucocerebrosidase
MEFSSPSREECPKPLSRVSIMAGSLTGLLLLQAVSWASGARPCIPKSFGYSSVVCVCNATYCDSFDPPTLPALGTFSRYESTRSGRRMELSMGPIQANHTGTGLLLTLQPEQKFQKVKGFGGAMTDAAALNILALSPPAQNLLLKSYFSEEGIGYNIIRVPMASCDFSIRTYTYADTPDDFQLHNFSLPEEDTKLKIPLIHRALQLSQRPVSLFASPWTSPTWLKTNGAVNGKGSLKGQPGDIYHRTWARYFVKFLDAYAEHKLQFWAVTAENEPSAGLLSGYPFQCLGFTPEHQRDFIARDLGPTLANSTHHNVRLLMLDDQRLLLPHWAKVVLTDPEAAKYVHGIAVHWYLDFLAPAKATLGETHRLFPNTMLFASEACVGSKFWEQSVRLGSWDRGMQYSHSIITNLLYHVVGWTDWNLALNPEGGPNWVRNFVDSPIIVDITKDTFYKQPMFYHLGHFSKFIPEGSQRVGLVASQKNDLDAVALLHPDGSAVVVVLNRSSKDVPLTIKDPAVGFLETISPGYSIHTYLWRRQ

SEQ ID NO: 817 - DNA, 1614 bp, synthetic construct
  misc_feature 1..1614: note = Variant of B-Glucocerebrosidase
  source 1..1614: mol_type = other DNA
atggagttttcttctcctagtagagaagaatgccccaagccactgagcagggtgagcatcatggctggatccctcacagggctgcttcttttgcaggcagtctcatgggcctctggagccaggccctgtattcccaagtcattcggctactcctcagtggtgtgtgtatgcaatgccacctattgtgacagtttcgatcctccaactctccctgctctgggtaccttctcccggtatgagagcacaagaagtggaagacgcatggagctctcaatgggccctatacaggctaaccacactgggacaggtctgctgctgaccctccaacctgaacagaagtttcagaaagtcaagggatttggaggagccatgactgatgcagcagcactcaacatcttggccctgtctccaccagcccagaatctgctgttgaagtcctacttctcagaggaggggattggctacaacatcatccgggttcccatggctagctgtgacttctccattaggacctatacatacgctgacacccccgatgattttcagctccataatttcagtctccctgaagaagacaccaaactgaagatacctctgattcacagagccttgcaactgtcccaaaggccagtgagcctcttcgcttctccctggactagtcctacatggctgaagactaatggtgctgttaatgggaaaggctccctgaaaggacagccaggtgacatatatcatcagacatgggcccgctactttgtgaaattccttgatgcctatgcagagcacaagctccaattctgggcagtcaccgcagaaaacgagccctcagctgggctgctgtctggctacccctttcagtgcttgggctttactcctgagcatcaacgggacttcattgcccgggatttggggccaacactggccaacagcacccaccacaatgtaagactcctcatgctggatgaccagaggctgctgctccctcattgggccaaggtggtgttgacagacccagaagctgccaaatatgttcatggcatcgctgtccactggtacctggattttttggcccctgcaaagtggactctgggagagacccacagactcttccccaataccatgctgtttgcatcagaagcctgcgtggggagcaaattctgggagcagtctgttaggctgggttcctgggatcggggcatgcaatattcccatagtataataactaacctcctctaccacgtggtaggatggacagactggaatctggctttgaacccagaaggaggccccaattgggtgcgcaactttgttgacagccccatcattgtggatatcacaaaggacaccttctacaaacagcctatgttctatcatctggggcactttagcaagttcattccagagggttcccagagagtaggcttggttgcctcacagaagaatgatctggatgctgtggcactcctgcatcctgacgggagtgcagtggtggtagtactgaacaggtctagcaaagatgttcccttgactatcaaagacccagctgtgggctttctggaaaccatttcccctggatactctatccacacctatctctggagaagacagtaatga

SEQ ID NO: 818 - protein, 536 aa, synthetic construct
  REGION 1..536: note = Variant of B-Glucocerebrosidase
MEFSSPSREECPKPLSRVSIMAGSLTGLLLLQAVSWASGARPCIPKSFGYSSVVCVCNATYCDSFDPPTLPALGTFSRYESTRSGRRMELSMGPIQANHTGTGLLLTLQPEQKFQKVKGFGGAMTDAAALNILALSPPAQNLLLKSYFSEEGIGYNIIRVPMASCDFSIRTYTYADTPDDFQLHNFSLPEEDTKLKIPLIHRALQLSQRPVSLFASPWTSPTWLKTNGAVNGKGSLKGQPGDIYHQTWARYFVKFLDAYAEHKLQFWAVTAENEPSAGLLSGYPFQCLGFTPEHQRDFIARDLGPTLANSTHHNVRLLMLDDQRLLLPHWAKVVLTDPEAAKYVHGIAVHWYLDFLAPAKWTLGETHRLFPNTMLFASEACVGSKFWEQSVRLGSWDRGMQYSHSIITNLLYHVVGWTDWNLALNPEGGPNWVRNFVDSPIIVDITKDTFYKQPMFYHLGHFSKFIPEGSQRVGLVASQKNDLDAVALLHPDGSAVVVVLNRSSKDVPLTIKDPAVGFLETISPGYSIHTYLWRRQ

SEQ ID NO: 819 - DNA, 1614 bp, synthetic construct
  misc_feature 1..1614: note = Variant of B-Glucocerebrosidase
  source 1..1614: mol_type = other DNA
atggagttttcttctcctagtagagaagaatgccccaagccactgagcagggtgagcatcatggctggatccctcacagggctgcttcttttgcaggcagtctcatgggcctctggagccaggccctgtattcccaagtcattcggctactcctcagtggtgtgtgtatgcaatgccacctattgtgacagtttcgatcctccaactctccctgctctgggtaccttctcccggtatgagagcacaagaagtggaagacgcatggagctctcaatgggccctatacaggctaaccacactgggacaggtctgctgctgaccctccaaccttttcagaagtttcagaaagtcaagggatttggaggagccatgactgatgcagcagcactcaacatcttggccctgtctccaccagcccagaatctgctgttgaagtcctacttctcagaggaggggattggctacaacatcatccgggttcccatggctagctgtgacttctccattaggacctatacatacgctgacacccccgatgattttcagctccataatttcagtctccctgaagaagacaccaaactgaagatacctctgattcacagagccttgcaactgtcccaaaggccagtgagcctcttcgcttctccctggactagtcctacatggctgaagactaatggtgctgttaatgggaaaggctccctgaaaggacagccaggtgacatatatcatcagacatgggcccgctactttgtgaaattccttgatgcctatgcagagcacaagctccaattctgggcagtcaccgcagaaaacgagccctcagctgggctgctgtctggctacccctttcagtgcttgggctttactcctgagcatcaacgggacttcattgcccgggatttggggccaacactggccaacagcacccaccacaatgtaagactcctcatgctggatgaccagaggctgctgctccctcattgggccaaggtggtgttgacagacccagaagctgccaaatatgttcatggcatcgctgtccactggtacctggattttttggcccctgcaaaggctactctgggagagacccacagactcttccccaataccatgctgtttgcatcagaagcctgcgtggggagcaaattctgggagcagtctgttaggctgggttcctgggatcggggcatgcaatattcccatagtataataactaacctcctctaccacgtggtaggatggacagactggaatctggctttgaacccagaaggaggccccaattgggtgcgcaactttgttgacagccccatcattgtggatatcacaaaggacaccttctacaaacagcctatgttctatcatctggggcactttagcaagttcattccagagggttcccagagagtaggcttggttgcctcacagaagaatgatctggatgctgtggcactcctgcatcctgacgggagtgcagtggtggtagtactgaacaggtctagcaaagatgttcccttgactatcaaagacccagctgtgggctttctggaaaccatttcccctggatactctatccacacctatctctggagaagacagtaatga

SEQ ID NO: 820 - protein, 536 aa, synthetic construct
  REGION 1..536: note = Variant of B-Glucocerebrosidase
MEFSSPSREECPKPLSRVSIMAGSLTGLLLLQAVSWASGARPCIPKSFGYSSVVCVCNATYCDSFDPPTLPALGTFSRYESTRSGRRMELSMGPIQANHTGTGLLLTLQPFQKFQKVKGFGGAMTDAAALNILALSPPAQNLLLKSYFSEEGIGYNIIRVPMASCDFSIRTYTYADTPDDFQLHNFSLPEEDTKLKIPLIHRALQLSQRPVSLFASPWTSPTWLKTNGAVNGKGSLKGQPGDIYHQTWARYFVKFLDAYAEHKLQFWAVTAENEPSAGLLSGYPFQCLGFTPEHQRDFIARDLGPTLANSTHHNVRLLMLDDQRLLLPHWAKVVLTDPEAAKYVHGIAVHWYLDFLAPAKATLGETHRLFPNTMLFASEACVGSKFWEQSVRLGSWDRGMQYSHSIITNLLYHVVGWTDWNLALNPEGGPNWVRNFVDSPIIVDITKDTFYKQPMFYHLGHFSKFIPEGSQRVGLVASQKNDLDAVALLHPDGSAVVVVLNRSSKDVPLTIKDPAVGFLETISPGYSIHTYLWRRQ

SEQ ID NO: 821 - DNA, 1614 bp, synthetic construct
  misc_feature 1..1614: note = Variant of B-Glucocerebrosidase
  source 1..1614: mol_type = other DNA
atggagttttcttctcctagtagagaagaatgccccaagccactgagcagggtgagcatcatggctggatccctcacagggctgcttcttttgcaggcagtctcatgggcctctggagccaggccctgtattcccaagtcattcggctactcctcagtggtgtgtgtatgcaatgccacctattgtgacagtttcgatcctccaactctccctgctctgggtaccttctcccggtatgagagcacaagaagtggaagacgcatggagctctcaatgggccctatacaggctaaccacactgggacaggtctgctgctgaccctccaacctgaacagaagtttcagaaagtcaagggatttggaggagccatgactgatgcagcagcactcaacatcttggccctgtctccaccagcccagaatctgctgttgaagtcctacttctcagaggaggggattggctacaacatcatccgggttcccatggctagctgtgacttctccattaggacctatacatacgctgacacccccgatgattttcagctccataatttcagtctccctgaagaagacaccaaactgaagatacctctgattcacagagccttgcaactgtcccaaaggccagtgagcctcttcgcttctccctggactagtcctacatggctgaagactaatggtgctgttaatgggaaaggctccctgaaaggacagccaggtgacatatatcatcagacatgggcccgctactttgtgaaattccttgatgcctatgcagagcacaagctccaattctgggcagtcaccgcagaaaacgagccctcagctgggctgctgtctggctacccctttcagtgcttgggctttactcctgagcatcaacgggacttcattgcccgggatttggggccaacactggccaacagcacccaccacaatgtaagactcctcatgctggatgaccagaggctgctgctccctcattgggccaaggtggtgttgacagacccagaagctgccaaatatgttcatggcatcgctgtccactggtacctggattttttggcccctgcaaaggctactctgggagagacccacagactcttccccaataccatgctgtttgcatcagaagcctgcgtggggagcaaattctgggagcagtctgttaggctgggttcctgggatcggggcatgcaatattcccatagtataataactaacctcctctaccacgtggtaggatggacagactggaatctggctttgaacccagaaggaggccccaattgggtgcgcaactttgttgacagccccatcattgtggatatcacaaaggacaccttctacaaacagcctatgttctatcatctggggcactttagcaagttcattccagagggttcccagagagtaggcttggttgcctcacagaagaatgatctggatgctgtggcactcatgcatcctgacgggagtgcagtggtggtagtactgaacaggtctagcaaagatgttcccttgactatcaaagacccagctgtgggctttctggaaaccatttcccctggatactctatccacacctatctctggagaagacagtaatga

SEQ ID NO: 822 - protein, 536 aa, synthetic construct
  REGION 1..536: note = Variant of B-Glucocerebrosidase
MEFSSPSREECPKPLSRVSIMAGSLTGLLLLQAVSWASGARPCIPKSFGYSSVVCVCNATYCDSFDPPTLPALGTFSRYESTRSGRRMELSMGPIQANHTGTGLLLTLQPEQKFQKVKGFGGAMTDAAALNILALSPPAQNLLLKSYFSEEGIGYNIIRVPMASCDFSIRTYTYADTPDDFQLHNFSLPEEDTKLKIPLIHRALQLSQRPVSLFASPWTSPTWLKTNGAVNGKGSLKGQPGDIYHQTWARYFVKFLDAYAEHKLQFWAVTAENEPSAGLLSGYPFQCLGFTPEHQRDFIARDLGPTLANSTHHNVRLLMLDDQRLLLPHWAKVVLTDPEAAKYVHGIAVHWYLDFLAPAKATLGETHRLFPNTMLFASEACVGSKFWEQSVRLGSWDRGMQYSHSIITNLLYHVVGWTDWNLALNPEGGPNWVRNFVDSPIIVDITKDTFYKQPMFYHLGHFSKFIPEGSQRVGLVASQKNDLDAVALMHPDGSAVVVVLNRSSKDVPLTIKDPAVGFLETISPGYSIHTYLWRRQ

SEQ ID NO: 823 - DNA, 1614 bp, synthetic construct
  misc_feature 1..1614: note = Variant of B-Glucocerebrosidase
  source 1..1614: mol_type = other DNA
atggagttttcttctcctagtagagaagaatgccccaagccactgagcagggtgagcatcatggctggatccctcacagggctgcttcttttgcaggcagtctcatgggcctctggagccaggccctgtattcccaagtcattcggctactcctcagtggtgtgtgtatgcaatgccacctattgtgacagtttcgatcctccaactctccctgctctgggtaccttctcccggtatgagagcacaagaagtggaagacgcatggagctctcaatgggccctatacaggctaaccacactgggacaggtctgctgctgaccctccaacctgaacagaagtttcagaaagtcaagggatttggaggagccatgactgatgcagcagcactcaacatcttggccctgtctccaccagcccagaatctgctgttgaagtcctacttctcagaggaggggattggctacaacatcatccgggttcccatggctagctgtgacttctccattaggacctatacatacgctgacacccccgatgattttcagctccataatttcagtctccctgaagaagacaccaaactgaagatacctctgattcacagagccttgcaactgtcccaaaggccagtgagcctcttcgcttctccctggactagtcctacatggctgaagactaatggtgctgttaatgggaaaggctccctgaaaggacagccaggtgacatatatcatcagacatgggcccgctactttgtgaaattccttgatgcctatgcagagcacaagctccaattctgggcagtcaccgcagaaaacgagccctcagctgggctgctgtctggctacccctttcagtgcttgggctttactcctgagcatcaacgggacttcattgcccgggatttggggccaacactggccaacagcacccaccacaatgtaagactcctcatgctggatgaccagaggctgctgctccctcattgggccaaggtggtgttgacagacccagaagctgccaaatatgttcatggcatcgctgtccactggtacctggattttttggcccctgcaaaggctactctgggagagacccacagactcttccccaataccatgctgtttgcatcagaagcctgcgtggggagcaaattctgggagcagtctgttaggctgggttcctgggatcggggcatgcaatattcccatagtataataactaacctcctctaccacgtggtaggatggacagactggaatctggctttgaacccagaaggaggccccaattgggtgcgcaactttgttgacagccccatcattgtggatatcacaaaggacaccttctacaaacagcctatgttctatcatctggggcactttagcaagttcattccagagggttcccagagagtaggcttggttaggtcacagaagaatgatctggatgctgtggcactcctgcatcctgacgggagtgcagtggtggtagtactgaacaggtctagcaaagatgttcccttgactatcaaagacccagctgtgggctttctggaaaccatttcccctggatactctatccacacctatctctggagaagacagtaatga

SEQ ID NO: 824 - protein, 536 aa, synthetic construct
  REGION 1..536: note = Variant of B-Glucocerebrosidase
MEFSSPSREECPKPLSRVSIMAGSLTGLLLLQAVSWASGARPCIPKSFGYSSVVCVCNATYCDSFDPPTLPALGTFSRYESTRSGRRMELSMGPIQANHTGTGLLLTLQPEQKFQKVKGFGGAMTDAAALNILALSPPAQNLLLKSYFSEEGIGYNIIRVPMASCDFSIRTYTYADTPDDFQLHNFSLPEEDTKLKIPLIHRALQLSQRPVSLFASPWTSPTWLKTNGAVNGKGSLKGQPGDIYHQTWARYFVKFLDAYAEHKLQFWAVTAENEPSAGLLSGYPFQCLGFTPEHQRDFIARDLGPTLANSTHHNVRLLMLDDQRLLLPHWAKVVLTDPEAAKYVHGIAVHWYLDFLAPAKATLGETHRLFPNTMLFASEACVGSKFWEQSVRLGSWDRGMQYSHSIITNLLYHVVGWTDWNLALNPEGGPNWVRNFVDSPIIVDITKDTFYKQPMFYHLGHFSKFIPEGSQRVGLVRSQKNDLDAVALLHPDGSAVVVVLNRSSKDVPLTIKDPAVGFLETISPGYSIHTYLWRRQ

SEQ ID NO: 825 - DNA, 1614 bp, synthetic construct
  misc_feature 1..1614: note = Variant of B-Glucocerebrosidase
  source 1..1614: mol_type = other DNA
atggagttttcttctcctagtagagaagaatgccccaagccactgagcagggtgagcatcatggctggatccctcacagggctgcttcttttgcaggcagtctcatgggcctctggagccaggccctgtattcccaagtcattcggctactcctcagtggtgtgtgtatgcaatgccacctattgtgacagtttcgatcctccaactctccctgctctgggtaccttctcccggtatgagagcacaagaagtggaagacgcatggagctctcaatgggccctatacaggctaaccacactgggacaggtctgctgctgaccctccaacctgaacagaagtttcagtatgtcaagggatttggaggagccatgactgatgcagcagcactcaacatcttggccctgtctccaccagcccagaatctgctgttgaagtcctacttctcagaggaggggattggctacaacatcatccgggttcccatggctagctgtgacttctccattaggacctatacatacgctgacacccccgatgattttcagctccataatttcagtctccctgaagaagacaccaaactgaagatacctctgattcacagagccttgcaactgtcccaaaggccagtgagcctcttcgcttctccctggactagtcctacatggctgaagactaatggtgctgttaatgggaaaggctccctgaaaggacagccaggtgacatatatcatcagacatgggcccgctactttgtgaaattccttgatgcctatgcagagcacaagctccaattctgggcagtcaccgcagaaaacgagccctcagctgggctgctgtctggctacccctttcagtgcttgggctttactcctgagcatcaacgggacttcattgcccgggatttggggccaacactggccaacagcacccaccacaatgtaagactcctcatgctggatgaccagaggctgctgctccctcattgggccaaggtggtgttgacagacccagaagctgccaaatatgttcatggcatcgctgtccactggtacctggattttttggcccctgcaaaggctactctgggagagacccacagactcttccccaataccatgctgtttgcatcagaagcctgcgtggggagcaaattctgggagcagtctgttaggctgggttcctgggatcggggcatgcaatattcccatagtataataactaacctcctctaccacgtggtaggatggacagactggaatctggctttgaacccagaaggaggccccaattgggtgcgcaactttgttgacagccccatcattgtggatatcacaaaggacaccttctacaaacagcctatgttctatcatctggggcactttagcaagttcattccagagggttcccagagagtaggcttggttgcctcacagaagaatgatctggatgctgtggcactcctgcatcctgacgggagtgcagtggtggtagtactgaacaggtctagcaaagatgttcccttgactatcaaagacccagctgtgggctttctggaaaccatttcccctggatactctatccacacctatctctggagaagacagtaatga

SEQ ID NO: 826 - protein, 536 aa, synthetic construct
  REGION 1..536: note = Variant of B-Glucocerebrosidase
MEFSSPSREECPKPLSRVSIMAGSLTGLLLLQAVSWASGARPCIPKSFGYSSVVCVCNATYCDSFDPPTLPALGTFSRYESTRSGRRMELSMGPIQANHTGTGLLLTLQPEQKFQYVKGFGGAMTDAAALNILALSPPAQNLLLKSYFSEEGIGYNIIRVPMASCDFSIRTYTYADTPDDFQLHNFSLPEEDTKLKIPLIHRALQLSQRPVSLFASPWTSPTWLKTNGAVNGKGSLKGQPGDIYHQTWARYFVKFLDAYAEHKLQFWAVTAENEPSAGLLSGYPFQCLGFTPEHQRDFIARDLGPTLANSTHHNVRLLMLDDQRLLLPHWAKVVLTDPEAAKYVHGIAVHWYLDFLAPAKATLGETHRLFPNTMLFASEACVGSKFWEQSVRLGSWDRGMQYSHSIITNLLYHVVGWTDWNLALNPEGGPNWVRNFVDSPIIVDITKDTFYKQPMFYHLGHFSKFIPEGSQRVGLVASQKNDLDAVALLHPDGSAVVVVLNRSSKDVPLTIKDPAVGFLETISPGYSIHTYLWRRQ

SEQ ID NO: 827 - DNA, 1614 bp, synthetic construct
  misc_feature 1..1614: note = Variant of B-Glucocerebrosidase
  source 1..1614: mol_type = other DNA
atggagttttcttctcctagtagagaagaatgccccaagccactgagcagggtgagcatcatggctggatccctcacagggctgcttcttttgcaggcagtctcatgggcctctggagccaggccctgtattcccaggtcattcggctactcctcagtggtgtgtgtatgcaatgccacctattgtgacagtttcgatcctccaactctccctgctctgggtaccttctcccggtatgagagcacaagaagtggaagacgcatggagctctcaatgggccctatacaggctaaccacactgggacaggtctgctgctgaccctccaacctgaacagaagtttcagaaagtcaagggatttggaggagccatgactgatgcagcagcactcaacatcttggccctgtctccaccagcccagaatctgctgttgaagtcctacttctcagaggaggggattggctacaacatcatccgggttcccatggctagctgtgacttctccattaggacctatacatacgctgacacccccgatgattttcagctccataatttcagtctccctgaagaagacaccaaactgaagatacctctgattcacagagccttgcaactgtcccaaaggccagtgagcctcttcgcttctccctggactagtcctacatggctgaagactaatggtgctgttaatgggaaaggctccctgaaaggacagccaggtgacatatatcatcagacatgggcccgctactttgtgaaattccttgatgcctatgcagagcacaagctccaattctgggcagtcaccgcagaaaacgagccctcagctgggctgctgtctggctacccctttcagtgcttgggctttactcctgagcatcaacgggacttcattgcccgggatttggggccaacactggccaacagcacccaccacaatgtaagactcctcatgctggatgaccagaggctgctgctccctcattgggccaaggtggtgttgacagacccagaagctgccaaatatgttcatggcatcgctgtccactggtacctggattttttggcccctgcaaaggctactctgggagagacccacagactcttccccaataccatgctgtttgcatcagaagcctgcgtggggagcaaattctgggagcagtctgttaggctgggttcctgggatcggggcatgcaatattcccatagtataataactaacctcctctaccacgtggtaggatggacagactggaatctggctttgaacccagaaggaggccccaattgggtgcgcaactttgttgacagccccatcattgtggatatcacaaaggacaccttctacaaacagcctatgttctatcatctggggcactttagcaagttcattccagagggttcccagagagtaggcttggttgcctcacagaagaatgatctggatgctgtggcactcctgcatcctgacgggagtgcagtggtggtagtactgaacaggtctagcaaagatgttcccttgactatcaaagacccagctgtgggctttctggaaaccatttcccctggatactctatccacacctatctctggagaagacagtaatga

SEQ ID NO: 828 - protein, 536 aa, synthetic construct
  REGION 1..536: note = Variant of B-Glucocerebrosidase
MEFSSPSREECPKPLSRVSIMAGSLTGLLLLQAVSWASGARPCIPRSFGYSSVVCVCNATYCDSFDPPTLPALGTFSRYESTRSGRRMELSMGPIQANHTGTGLLLTLQPEQKFQKVKGFGGAMTDAAALNILALSPPAQNLLLKSYFSEEGIGYNIIRVPMASCDFSIRTYTYADTPDDFQLHNFSLPEEDTKLKIPLIHRALQLSQRPVSLFASPWTSPTWLKTNGAVNGKGSLKGQPGDIYHQTWARYFVKFLDAYAEHKLQFWAVTAENEPSAGLLSGYPFQCLGFTPEHQRDFIARDLGPTLANSTHHNVRLLMLDDQRLLLPHWAKVVLTDPEAAKYVHGIAVHWYLDFLAPAKATLGETHRLFPNTMLFASEACVGSKFWEQSVRLGSWDRGMQYSHSIITNLLYHVVGWTDWNLALNPEGGPNWVRNFVDSPIIVDITKDTFYKQPMFYHLGHFSKFIPEGSQRVGLVASQKNDLDAVALLHPDGSAVVVVLNRSSKDVPLTIKDPAVGFLETISPGYSIHTYLWRRQ

SEQ ID NO: 829 - DNA, 1614 bp, synthetic construct
  misc_feature 1..1614: note = Variant of B-Glucocerebrosidase
  source 1..1614: mol_type = other DNA
atggagttttcttctcctagtagagaagaatgccccaagccactgagcagggtgagcatcatggctggatccctcacagggctgcttcttttgcaggcagtctcatgggcctctggagccaggccctgtattcccaagtcattcggctactcctcagtggtgtgtgtatgcaatgccacctattgtgacagtttcgatcctccaactctccctgctctgggtaccttctcccggtatgagagcacaagaagtggaagacgcatggagctctcaatgggccctatacaggctaaccacactgggacaggtctgctgctgaccctccaacctgaacagaagtttcagaaagtcaagggatttggaggagccatgactgatgcagcagcactcaacatcatggccctgtctccaccagcccagaatctgctgttgaagtcctacttctcagaggaggggattggctacaacatcatccgggttcccatggctagctgtgacttctccattaggacctatacatacgctgacacccccgatgattttcagctccataatttcagtctccctgaagaagacaccaaactgaagatacctctgattcacagagccttgcaactgtcccaaaggccagtgagcctcttcgcttctccctggactagtcctacatggctgaagactaatggtgctgttaatgggaaaggctccctgaaaggacagccaggtgacatatatcatcagacatgggcccgctactttgtgaaattccttgatgcctatgcagagcacaagctccaattctgggcagtcaccgcagaaaacgagccctcagctgggctgctgtctggctacccctttcagtgcttgggctttactcctgagcatcaacgggacttcattgcccgggatttggggccaacactggccaacagcacccaccacaatgtaagactcctcatgctggatgaccagaggctgctgctccctcattgggccaaggtggtgttgacagacccagaagctgccaaatatgttcatggcatcgctgtccactggtacctggattttttggcccctgcaaaggctactctgggagagacccacagactcttccccaataccatgctgtttgcatcagaagcctgcgtggggagcaaattctgggagcagtctgttaggctgggttcctgggatcggggcatgcaatattcccatagtataataactaacctcctctaccacgtggtaggatggacagactggaatctggctttgaacccagaaggaggccccaattgggtgcgcaactttgttgacagccccatcattgtggatatcacaaaggacaccttctacaaacagcctatgttctatcatctggggcactttagcaagttcattccagagggttcccagagagtaggcttggttgcctcacagaagaatgatctggatgctgtggcactcctgcatcctgacgggagtgcagtggtggtagtactgaacaggtctagcaaagatgttcccttgactatcaaagacccagctgtgggctttctggaaaccatttcccctggatactctatccacacctatctctggagaagacagtaatga

SEQ ID NO: 830 - protein, 536 aa, synthetic construct
  REGION 1..536: note = Variant of B-Glucocerebrosidase
MEFSSPSREECPKPLSRVSIMAGSLTGLLLLQAVSWASGARPCIPKSFGYSSVVCVCNATYCDSFDPPTLPALGTFSRYESTRSGRRMELSMGPIQANHTGTGLLLTLQPEQKFQKVKGFGGAMTDAAALNIMALSPPAQNLLLKSYFSEEGIGYNIIRVPMASCDFSIRTYTYADTPDDFQLHNFSLPEEDTKLKIPLIHRALQLSQRPVSLFASPWTSPTWLKTNGAVNGKGSLKGQPGDIYHQTWARYFVKFLDAYAEHKLQFWAVTAENEPSAGLLSGYPFQCLGFTPEHQRDFIARDLGPTLANSTHHNVRLLMLDDQRLLLPHWAKVVLTDPEAAKYVHGIAVHWYLDFLAPAKATLGETHRLFPNTMLFASEACVGSKFWEQSVRLGSWDRGMQYSHSIITNLLYHVVGWTDWNLALNPEGGPNWVRNFVDSPIIVDITKDTFYKQPMFYHLGHFSKFIPEGSQRVGLVASQKNDLDAVALLHPDGSAVVVVLNRSSKDVPLTIKDPAVGFLETISPGYSIHTYLWRRQ

SEQ ID NO: 831 - DNA, 1614 bp, synthetic construct
  misc_feature 1..1614: note = Variant of B-Glucocerebrosidase
  source 1..1614: mol_type = other DNA
atggagttttcttctcctagtagagaagaatgccccaagccactgagcagggtgagcatcatggctggatccctcacagggctgcttcttttgcaggcagtctcatgggcctctggagccaggccctgtattcccaagtcattcggctactcctcagtggtgtgtgtatgcaatgccacctattgtgacagtttcgatcctccaactctccctgctctgggtaccttctcccggtatgagagcacaagaagtggaagacgcatggagctctcaatgggccctatacaggctaaccacactgggacaggtctgctgctgaccctccaacctgaacagaagtttcagaaagtcaagggatttggaggagccatgactgatgcagcagcactcaacatcttggccctgtctccaccagcccagaatctgctgttgaagtcctacttctcagaggaggggattggctacaacatcatccgggttcccatggctagctgtgacttctccattaggacctatacatacgctgacacccccgatgattttcagctccataatttcagtctccctgaagaagacaccaaactgaagatacctctgattcacagagccttgcaactgtcccaaaggccagtgagcctcttcgcttctccctggactagtcctacatggctgaagactaatggtgctgttaatgggaaaggctccctgaaaggacagccaggtgacatatatcatcagacatgggcccgctactttgtgaaattccttgatgcctatgcagagcacaagctccaattctgggcagtcaccgcagaaaacgagccctcagctgggctgctgtctggctacccctttcagtgcttgggctttactcctgagcatcaacgggacttcattgcccgggatttggggccaacactggccaacagcacccaccacaatgtaagactcctcatgctggatgaccagaggctgctgctccctcattgggcccgggtggtgttgacagacccagaagctgccaaatatgttcatggcatcgctgtccactggtacctggattttttggcccctgcaaaggctactctgggagagacccacagactcttccccaataccatgctgtttgcatcagaagcctgcgtggggagcaaattctgggagcagtctgttaggctgggttcctgggatcggggcatgcaatattcccatagtataataactaacctcctctaccacgtggtaggatggacagactggaatctggctttgaacccagaaggaggccccaattgggtgcgcaactttgttgacagccccatcattgtggatatcacaaaggacaccttctacaaacagcctatgttctatcatctggggcactttagcaagttcattccagagggttcccagagagtaggcttggttgcctcacagaagaatgatctggatgctgtggcactcctgcatcctgacgggagtgcagtggtggtagtactgaacaggtctagcaaagatgttcccttgactatcaaagacccagctgtgggctttctggaaaccatttcccctggatactctatccacacctatctctggagaagacagtaatga

SEQ ID NO: 832 - protein, 536 aa, synthetic construct
  REGION 1..536: note = Variant of B-Glucocerebrosidase
MEFSSPSREECPKPLSRVSIMAGSLTGLLLLQAVSWASGARPCIPKSFGYSSVVCVCNATYCDSFDPPTLPALGTFSRYESTRSGRRMELSMGPIQANHTGTGLLLTLQPEQKFQKVKGFGGAMTDAAALNILALSPPAQNLLLKSYFSEEGIGYNIIRVPMASCDFSIRTYTYADTPDDFQLHNFSLPEEDTKLKIPLIHRALQLSQRPVSLFASPWTSPTWLKTNGAVNGKGSLKGQPGDIYHQTWARYFVKFLDAYAEHKLQFWAVTAENEPSAGLLSGYPFQCLGFTPEHQRDFIARDLGPTLANSTHHNVRLLMLDDQRLLLPHWARVVLTDPEAAKYVHGIAVHWYLDFLAPAKATLGETHRLFPNTMLFASEACVGSKFWEQSVRLGSWDRGMQYSHSIITNLLYHVVGWTDWNLALNPEGGPNWVRNFVDSPIIVDITKDTFYKQPMFYHLGHFSKFIPEGSQRVGLVASQKNDLDAVALLHPDGSAVVVVLNRSSKDVPLTIKDPAVGFLETISPGYSIHTYLWRRQ

SEQ ID NO: 833 - DNA, 1614 bp, synthetic construct
  misc_feature 1..1614: note = Variant of B-Glucocerebrosidase
  source 1..1614: mol_type = other DNA
atggagttttcttctcctagtagagaagaatgccccaagccactgagcagggtgagcatcatggctggatccctcacagggctgcttcttttgcaggcagtctcatgggcctctggagccaggccctgtattcccaagtcattcggctactcctcagtggtgtgtgtatgcaatgccacctattgtgacagtttcgatcctccaactctccctgctctgggtaccttctcccggtatgagagcacaagaagtggaagacgcatggagctctcaatgggccctatacaggctaaccacactgggacaggtctgctgctgaccctccaacctgaacagaagtttcagaaagtcaagggatttggaggagccatgactgatgcagcagcactcaacatcttggccctgtctccaccagcccagaatctgctgttgaagtcctacttctcagaggaggggattggctacaacatcatccgggttcccatggctagctgtgacttctccattaggacctatacatacgctgacacccccgatgattttcagctccataatttcagtctccctgaagaagacaccaaactgaagatacctctgattcacagagccttgcaactgtcccaaaggccagtgagcctcttcgcttctccctggactagtcctacatggctgaagactaatggtgctgttaatgggaaaggctccctgaaaggacgtccaggtgacatctatcatcagacatgggcccgctactttgtgaaattccttgatgcctatgcagagcacaagctccaattctgggcagtcaccgcagaaaacgagccctcagctgggctgctgtctggctacccctttcagtgcttgggctttactcctgagcatcaacgggacttcattgcccgggatttggggccaacactggccaacagcacccaccacaatgtaagactcctcatgctggatgaccagaggctgctgctccctcattgggccaaggtggtgttgacagacccagaagctgccaaatatgttcatggcatcgctgtccactggtacctggattttttggcccctgcaaaggctactctgggagagacccacagactcttccccaataccatgctgtttgcatcagaagcctgcgtggggagcaaattctgggagcagtctgttaggctgggttcctgggatcggggcatgcaatattcccatagtataataactaacctcctctaccacgtggtaggatggacagactggaatctggctttgaacccagaaggaggccccaattgggtgcgcaactttgttgacagccccatcattgtggatatcacaaaggacaccttctacaaacagcctatgttctatcatctggggcactttagcaagttcattccagagggttcccagagagtaggcttggttgcctcacagaagaatgatctggatgctgtggcactcctgcatcctgacgggagtgcagtggtggtagtactgaacaggtctagcaaagatgttcccttgactatcaaagacccagctgtgggctttctggaaaccatttcccctggatactctatccacacctatctctggagaagacagtaatga

SEQ ID NO: 834 - protein, 536 aa, synthetic construct
  REGION 1..536: note = Variant of B-Glucocerebrosidase
MEFSSPSREECPKPLSRVSIMAGSLTGLLLLQAVSWASGARPCIPKSFGYSSVVCVCNATYCDSFDPPTLPALGTFSRYESTRSGRRMELSMGPIQANHTGTGLLLTLQPEQKFQKVKGFGGAMTDAAALNILALSPPAQNLLLKSYFSEEGIGYNIIRVPMASCDFSIRTYTYADTPDDFQLHNFSLPEEDTKLKIPLIHRALQLSQRPVSLFASPWTSPTWLKTNGAVNGKGSLKGRPGDIYHQTWARYFVKFLDAYAEHKLQFWAVTAENEPSAGLLSGYPFQCLGFTPEHQRDFIARDLGPTLANSTHHNVRLLMLDDQRLLLPHWAKVVLTDPEAAKYVHGIAVHWYLDFLAPAKATLGETHRLFPNTMLFASEACVGSKFWEQSVRLGSWDRGMQYSHSIITNLLYHVVGWTDWNLALNPEGGPNWVRNFVDSPIIVDITKDTFYKQPMFYHLGHFSKFIPEGSQRVGLVASQKNDLDAVALLHPDGSAVVVVLNRSSKDVPLTIKDPAVGFLETISPGYSIHTYLWRRQ

SEQ ID NO: 835 - DNA, 1614 bp, synthetic construct
  misc_feature 1..1614: note = Variant of B-Glucocerebrosidase
  source 1..1614: mol_type = other DNA
atggagttttcttctcctagtagagaagaatgccccaagccactgagcagggtgagcatcatggctggatccctcacagggctgcttcttttgcaggcagtctcatgggcctctggagccaggccctgtattcccaagtcattcggctactcctcagtggtgtgtgtatgcaatgccacctattgtgacagtttcgatcctccaactctccctgctctgggtaccttctcccggtatgagagcacaagaagtggaagacgcatggagctctcaatgggccctatacaggctaaccacactgggacaggtctgctgctgaccctcgggcctgaacagaagtttcagaaagtcaagggatttggaggagccatgactgatgcagcagcactcaacatcttggccctgtctccaccagcccagaatctgctgttgaagtcctacttctcagaggaggggattggctacaacatcatccgggttcccatggctagctgtgacttctccattaggacctatacatacgctgacacccccgatgattttcagctccataatttcagtctccctgaagaagacaccaaactgaagatacctctgattcacagagccttgcaactgtcccaaaggccagtgagcctcttcgcttctccctggactagtcctacatggctgaagactaatggtgctgttaatgggaaaggctccctgaaaggacagccaggtgacatatatcatcagacatgggcccgctactttgtgaaattccttgatgcctatgcagagcacaagctccaattctgggcagtcaccgcagaaaacgagccctcagctgggctgctgtctggctacccctttcagtgcttgggctttactcctgagcatcaacgggacttcattgcccgggatttggggccaacactggccaacagcacccaccacaatgtaagactcctcatgctggatgaccagaggctgctgctccctcattgggccaaggtggtgttgacagacccagaagctgccaaatatgttcatggcatcgctgtccactggtacctggattttttggcccctgcaaaggctactctgggagagacccacagactcttccccaataccatgctgtttgcatcagaagcctgcgtggggagcaaattctgggagcagtctgttaggctgggttcctgggatcggggcatgcaatattcccatagtataataactaacctcctctaccacgtggtaggatggacagactggaatctggctttgaacccagaaggaggccccaattgggtgcgcaactttgttgacagccccatcattgtggatatcacaaaggacaccttctacaaacagcctatgttctatcatctggggcactttagcaagttcattccagagggttcccagagagtaggcttggttgcctcacagaagaatgatctggatgctgtggcactcctgcatcctgacgggagtgcagtggtggtagtactgaacaggtctagcaaagatgttcccttgactatcaaagacccagctgtgggctttctggaaaccatttcccctggatactctatccacacctatctctggagaagacagtaatga

SEQ ID NO: 836 - protein, 536 aa, synthetic construct
  REGION 1..536: note = Variant of B-Glucocerebrosidase
MEFSSPSREECPKPLSRVSIMAGSLTGLLLLQAVSWASGARPCIPKSFGYSSVVCVCNATYCDSFDPPTLPALGTFSRYESTRSGRRMELSMGPIQANHTGTGLLLTLGPEQKFQKVKGFGGAMTDAAALNILALSPPAQNLLLKSYFSEEGIGYNIIRVPMASCDFSIRTYTYADTPDDFQLHNFSLPEEDTKLKIPLIHRALQLSQRPVSLFASPWTSPTWLKTNGAVNGKGSLKGQPGDIYHQTWARYFVKFLDAYAEHKLQFWAVTAENEPSAGLLSGYPFQCLGFTPEHQRDFIARDLGPTLANSTHHNVRLLMLDDQRLLLPHWAKVVLTDPEAAKYVHGIAVHWYLDFLAPAKATLGETHRLFPNTMLFASEACVGSKFWEQSVRLGSWDRGMQYSHSIITNLLYHVVGWTDWNLALNPEGGPNWVRNFVDSPIIVDITKDTFYKQPMFYHLGHFSKFIPEGSQRVGLVASQKNDLDAVALLHPDGSAVVVVLNRSSKDVPLTIKDPAVGFLETISPGYSIHTYLWRRQ

SEQ ID NO: 837 - DNA, 1614 bp, synthetic construct
  misc_feature 1..1614: note = Variant of B-Glucocerebrosidase
  source 1..1614: mol_type = other DNA
atggagttttcttctcctagtagagaagaatgccccaagccactgagcagggtgagcatcatggctggatccctcacagggctgcttcttttgcaggcagtctcatgggcctctggagccaggccctgtattcccaagtcattcggctactcctcagtggtgtgtgtatgcaatgccacctattgtgacagtttcgatcctccaactctccctgctctgggtaccttctcccggtatgagagcacaagaagtggaagacgcatggagctctcaatgggccctatacaggctaaccacactgggacaggtctgctgctgaccctccaacctgaacagaagtttcagaaagtcaagggatttggaggagccatgactgatgcagcagcactcaacatcttggccctgtctccaccagcccagaatctgctgttgaagtcctacttctcagaggaggggattggctacaacatcatccgggttcccatggctagctgtgacttctccattaggacctatacatacgctgacacccccgatgattttcagctccataatttcagtctccctgaagaagacaccaaactgaagatacctctgattcacagagccttgcaactgtcccaaaggccagtgagcctcttcgcttctccctggactagtcctacatggctgaagactaatggtgctgttaatgggaaaggctccctgaaaggacagccaggtgacatatatcatcagacatgggcccgctactttgtgaaattccttgatgcctatgcagagcacaagctccaattctgggcagtcaccgcagaaaacgagccctcagctgggctgctgtctggctacccctttcagtgcttgggctttactcctgagcatcaacgggacttcattgcccgggatttggggccaacactggccaacagcacccaccacaatgtaagactcctcatgctggatgaccagaggctgctgctccctcattgggccaaggtggtgttgacagacccagaagctgccaaatatgttcatggcatcgctgtccactggtacctggattttttggcccctgcaaaggctactctgggagagacccacagactcttccccaataccatgctgtttgcatcagaagcctgcgtggggagcaaattctgggagcagtctgttaggctgggttcctgggatcggggcatgcaatattcccatagtataataactaacctcctctaccacgtggtaggatggacagactggaatctggctttgaacccagaaggaggccccaattgggtgcgcaactttgttgacagccccatcattgtggatatcacaaaggacaccttctacaaacagcctatgttctatcatctggggcactttagcaagttcattccagagggttcccagagagtaggcttggttgcctcacagaagaatgatctggatgctgtggcactcctgcatcctgacgggagtgcagtggtggtagtactgaacaggtctagcaaaacggttcccttgactatcaaagacccagctgtgggctttctggaaaccatttcccctggatactctatccacacctatctctggagaagacagtaatga

SEQ ID NO: 838 - protein, 536 aa, synthetic construct
  REGION 1..536: note = Variant of B-Glucocerebrosidase
MEFSSPSREECPKPLSRVSIMAGSLTGLLLLQAVSWASGARPCIPKSFGYSSVVCVCNATYCDSFDPPTLPALGTFSRYESTRSGRRMELSMGPIQANHTGTGLLLTLQPEQKFQKVKGFGGAMTDAAALNILALSPPAQNLLLKSYFSEEGIGYNIIRVPMASCDFSIRTYTYADTPDDFQLHNFSLPEEDTKLKIPLIHRALQLSQRPVSLFASPWTSPTWLKTNGAVNGKGSLKGQPGDIYHQTWARYFVKFLDAYAEHKLQFWAVTAENEPSAGLLSGYPFQCLGFTPEHQRDFIARDLGPTLANSTHHNVRLLMLDDQRLLLPHWAKVVLTDPEAAKYVHGIAVHWYLDFLAPAKATLGETHRLFPNTMLFASEACVGSKFWEQSVRLGSWDRGMQYSHSIITNLLYHVVGWTDWNLALNPEGGPNWVRNFVDSPIIVDITKDTFYKQPMFYHLGHFSKFIPEGSQRVGLVASQKNDLDAVALLHPDGSAVVVVLNRSSKTVPLTIKDPAVGFLETISPGYSIHTYLWRRQ

SEQ ID NO: 839 - DNA, 1614 bp, synthetic construct
  misc_feature 1..1614: note = Variant of B-Glucocerebrosidase
  source 1..1614: mol_type = other DNA
atggagttttcttctcctagtagagaagaatgccccaagccactgagcagggtgagcatcatggctggatccctcacagggctgcttcttttgcaggcagtctcatgggcctctggagccaggccctgtattcccaagtcattcggctactcctcagtggtgtgtgtatgcaatgccacctattgtgacagtttcgatcctccaactctccctgctctgggtaccttctcccggtatgagagcacaagaagtggaagacgcatggagctctcaatgggccctatacaggctaaccacactgggacaggtctgctgctgaccctccaacctgaacagaagtttcagaaagtcaagggatttggaggagccatgactgatgcagcagcactcaacatcttggccctgtctccaccagcccagaatctgctgttgaagtcctacttctcagaggaggggattggctacaacatcatccgggttcccatggctagctgtgacttctccattaggacctatacatacgctgacacccccgatgattttcagctccataatttcagtctccctgaagaagacaccaaactgaagatacctctgattcacagagccttgcaactgtcccaaaggccagtgagcctcttcgcttctccctggactagtcctacatggctgaagactaatggtgctgttaatgggaaaggctccctgaaaggacagccaggtgacatatatcatcagacatgggcccgctactttgtgaaattccttgatgcctatgcagagcacaagctccaattctgggcagtcaccgcagaaaacgagccctcagctgggctgctgtctggctacccctttcagtgcttgggctttactcctgagcatcaacgggacttcattgcccgggatttggggccaacactggccaacagcacccaccacaatgtaagactcctcatgctggatgaccagaggctgctgctccctcattgggccaaggtggtgttgacagacccagaagctgccaaatatgttcatggcatcgctgtccactggtacctggattttttggcccctgcaaaggctactctgggagagacccacagactcttccccaataccatgctgtttgcatcagaagcctgcgtggggagcaaattctgggagcagtctgttaggctgggttcctgggatcggggcatgcaatattcccatagtataataactaacctcctctaccacgtggtaggatggacagactggaatctggctttgaacccagaaggaggccccaattgggtgcgcaactttgttgacagccccatcattgtggatatcacaaaggacaccttctacaaacagcctatgttctatcatctggggcactttagcaagttcattccagagggttcccagagagtaggcttggttgcctcacagaagaatgatctggatgctgtggcactcctgcatcctgacgggagtgcagtggtggtagtactgaacaggtctggtaaagatgttcccttgactatcaaagacccagctgtgggctttctggaaaccatttcccctggatactctatccacacctatctctggagaagacagtaatga

SEQ ID NO: 840 - protein, 536 aa, synthetic construct
  REGION 1..536: note = Variant of B-Glucocerebrosidase
MEFSSPSREECPKPLSRVSIMAGSLTGLLLLQAVSWASGARPCIPKSFGYSSVVCVCNATYCDSFDPPTLPALGTFSRYESTRSGRRMELSMGPIQANHTGTGLLLTLQPEQKFQKVKGFGGAMTDAAALNILALSPPAQNLLLKSYFSEEGIGYNIIRVPMASCDFSIRTYTYADTPDDFQLHNFSLPEEDTKLKIPLIHRALQLSQRPVSLFASPWTSPTWLKTNGAVNGKGSLKGQPGDIYHQTWARYFVKFLDAYAEHKLQFWAVTAENEPSAGLLSGYPFQCLGFTPEHQRDFIARDLGPTLANSTHHNVRLLMLDDQRLLLPHWAKVVLTDPEAAKYVHGIAVHWYLDFLAPAKATLGETHRLFPNTMLFASEACVGSKFWEQSVRLGSWDRGMQYSHSIITNLLYHVVGWTDWNLALNPEGGPNWVRNFVDSPIIVDITKDTFYKQPMFYHLGHFSKFIPEGSQRVGLVASQKNDLDAVALLHPDGSAVVVVLNRSGKDVPLTIKDPAVGFLETISPGYSIHTYLWRRQ

SEQ ID NO: 841 - DNA, 1614 bp, synthetic construct
  misc_feature 1..1614: note = Variant of B-Glucocerebrosidase
  source 1..1614: mol_type = other DNA
atggagttttcttctcctagtagagaagaatgccccaagccactgagcagggtgagcatcatggctggatccctcacagggctgcttcttttgcaggcagtctcatgggcctctggagccaggccctgtattcccaagtcattcggctactcctcagtggtgtgtgtatgcaatgccacctattgtgacagtttcgatcctccaactctccctgctctgggtaccttctcccggtatgagagcacaagaagtggaagacgcatggagctctcaatgggccctatacaggctaaccacactgggacaggtctgctgctgaccctccaacctgaacagaagtttcagaaagtcaagggatttggaggagccatgactgatgcagcagcactcaacatcttggccctgtctccaccagcccagaatctgctgttgaagtcctacttctcagaggaggggattggctacaacatcatccgggttcccatggctagctgtgacttctccattaggacctatacatacgctgacacccccgatgattttcagctccataatttcagtctccctgaagaagacaccaaactgaagatacctctgattcacagagccttgcaactgtcccaaaggccagtgagcctcttcgcttctccctggactagtcctacatggctgaagactaatggtgctgttaatgggcagggctccctgaaaggacagccaggtgacatatatcatcagacatgggcccgctactttgtgaaattccttgatgcctatgcagagcacaagctccaattctgggcagtcaccgcagaaaacgagccctcagctgggctgctgtctggctacccctttcagtgcttgggctttactcctgagcatcaacgggacttcattgcccgggatttggggccaacactggccaacagcacccaccacaatgtaagactcctcatgctggatgaccagaggctgctgctccctcattgggccaaggtggtgttgacagacccagaagctgccaaatatgttcatggcatcgctgtccactggtacctggattttttggcccctgcaaaggctactctgggagagacccacagactcttccccaataccatgctgtttgcatcagaagcctgcgtggggagcaaattctgggagcagtctgttaggctgggttcctgggatcggggcatgcaatattcccatagtataataactaacctcctctaccacgtggtaggatggacagactggaatctggctttgaacccagaaggaggccccaattgggtgcgcaactttgttgacagccccatcattgtggatatcacaaaggacaccttctacaaacagcctatgttctatcatctggggcactttagcaagttcattccagagggttcccagagagtaggcttggttgcctcacagaagaatgatctggatgctgtggcactcctgcatcctgacgggagtgcagtggtggtagtactgaacaggtctagcaaagatgttcccttgactatcaaagacccagctgtgggctttctggaaaccatttcccctggatactctatccacacctatctctggagaagacagtaatga

SEQ ID NO: 842 - protein, 536 aa, synthetic construct
  REGION 1..536: note = Variant of B-Glucocerebrosidase
MEFSSPSREECPKPLSRVSIMAGSLTGLLLLQAVSWASGARPCIPKSFGYSSVVCVCNATYCDSFDPPTLPALGTFSRYESTRSGRRMELSMGPIQANHTGTGLLLTLQPEQKFQKVKGFGGAMTDAAALNILALSPPAQNLLLKSYFSEEGIGYNIIRVPMASCDFSIRTYTYADTPDDFQLHNFSLPEEDTKLKIPLIHRALQLSQRPVSLFASPWTSPTWLKTNGAVNGQGSLKGQPGDIYHQTWARYFVKFLDAYAEHKLQFWAVTAENEPSAGLLSGYPFQCLGFTPEHQRDFIARDLGPTLANSTHHNVRLLMLDDQRLLLPHWAKVVLTDPEAAKYVHGIAVHWYLDFLAPAKATLGETHRLFPNTMLFASEACVGSKFWEQSVRLGSWDRGMQYSHSIITNLLYHVVGWTDWNLALNPEGGPNWVRNFVDSPIIVDITKDTFYKQPMFYHLGHFSKFIPEGSQRVGLVASQKNDLDAVALLHPDGSAVVVVLNRSSKDVPLTIKDPAVGFLETISPGYSIHTYLWRRQ

SEQ ID NO: 843 - DNA, 1614 bp, synthetic construct
  misc_feature 1..1614: note = Variant of B-Glucocerebrosidase
  source 1..1614: mol_type = other DNA
atggagttttcttctcctagtagagaagaatgccccaagccactgagcagggtgagcatcatggctggatccctcacagggctgcttcttttgcaggcagtctcatgggcctctggagccaggccctgtattcccaagtcattcggctactcctcagtggtgtgtgtatgcaatgccacctattgtgacagtttcgatcctccaactctccctgctctgggtaccttctcccggtatgagagcacaagaagtggaagacgcatggagctctcaatgggcccaataagggctaaccacactgggacaggtctgctgctgaccctccaacctgaacagaagtttcagaaagtcaagggatttggaggagccatgactgatgcagcagcactcaacatcttggccctgtctccaccagcccagaatctgctgttgaagtcctacttctcagaggaggggattggctacaacatcatccgggttcccatggctagctgtgacttctccattaggacctatacatacgctgacacccccgatgattttcagctccataatttcagtctccctgaagaagacaccaaactgaagatacctctgattcacagagccttgcaactgtcccaaaggccagtgagcctcttcgcttctccctggactagtcctacatggctgaagactaatggtgctgttaatgggaaaggctccctgaaaggacagccaggtgacatatatcatcagacatgggcccgctactttgtgaaattccttgatgcctatgcagagcacaagctccaattctgggcagtcaccgcagaaaacgagccctcagctgggctgctgtctggctacccctttcagtgcttgggctttactcctgagcatcaacgggacttcattgcccgggatttggggccaacactggccaacagcacccaccacaatgtaagactcctcatgctggatgaccagaggctgctgctccctcattgggccaaggtggtgttgacagacccagaagctgccaaatatgttcatggcatcgctgtccactggtacctggattttttggcccctgcaaaggctactctgggagagacccacagactcttccccaataccatgctgtttgcatcagaagcctgcgtggggagcaaattctgggagcagtctgttaggctgggttcctgggatcggggcatgcaatattcccatagtataataactaacctcctctaccacgtggtaggatggacagactggaatctggctttgaacccagaaggaggccccaattgggtgcgcaactttgttgacagccccatcattgtggatatcacaaaggacaccttctacaaacagcctatgttctatcatctggggcactttagcaagttcattccagagggttcccagagagtaggcttggttgcctcacagaagaatgatctggatgctgtggcactcctgcatcctgacgggagtgcagtggtggtagtactgaacaggtctagcaaagatgttcccttgactatcaaagacccagctgtgggctttctggaaaccatttcccctggatactctatccacacctatctctggagaagacagtaatga

SEQ ID NO: 844 - protein, 536 aa, synthetic construct
  REGION 1..536: note = Variant of B-Glucocerebrosidase
MEFSSPSREECPKPLSRVSIMAGSLTGLLLLQAVSWASGARPCIPKSFGYSSVVCVCNATYCDSFDPPTLPALGTFSRYESTRSGRRMELSMGPIRANHTGTGLLLTLQPEQKFQKVKGFGGAMTDAAALNILALSPPAQNLLLKSYFSEEGIGYNIIRVPMASCDFSIRTYTYADTPDDFQLHNFSLPEEDTKLKIPLIHRALQLSQRPVSLFASPWTSPTWLKTNGAVNGKGSLKGQPGDIYHQTWARYFVKFLDAYAEHKLQFWAVTAENEPSAGLLSGYPFQCLGFTPEHQRDFIARDLGPTLANSTHHNVRLLMLDDQRLLLPHWAKVVLTDPEAAKYVHGIAVHWYLDFLAPAKATLGETHRLFPNTMLFASEACVGSKFWEQSVRLGSWDRGMQYSHSIITNLLYHVVGWTDWNLALNPEGGPNWVRNFVDSPIIVDITKDTFYKQPMFYHLGHFSKFIPEGSQRVGLVASQKNDLDAVALLHPDGSAVVVVLNRSSKDVPLTIKDPAVGFLETISPGYSIHTYLWRRQ

SEQ ID NO: 845 - DNA, 1614 bp, synthetic construct
  misc_feature 1..1614: note = Variant of B-Glucocerebrosidase
  source 1..1614: mol_type = other DNA
atggagttttcttctcctagtagagaagaatgccccaagccactgagcagggtgagcatcatggctggatccctcacagggctgcttcttttgcaggcagtctcatgggcctctggagccaggccctgtattcccaagtcattcggctactcctcagtggtgtgtgtatgcaatgccacctattgtgacagtttcgatcctccaactctccctgctctgggtaccttctcccggtatgagagcacaagaagtggaagacgcatggagctctcaatgggcccaatacaggctaacggtactgggacaggtctgctgctgaccctccaacctgaacagaagtttcagaaagtcaagggatttggaggagccatgactgatgcagcagcactcaacatcttggccctgtctccaccagcccagaatctgctgttgaagtcctacttctcagaggaggggattggctacaacatcatccgggttcccatggctagctgtgacttctccattaggacctatacatacgctgacacccccgatgattttcagctccataatttcagtctccctgaagaagacaccaaactgaagatacctctgattcacagagccttgcaactgtcccaaaggccagtgagcctcttcgcttctccctggactagtcctacatggctgaagactaatggtgctgttaatgggaaaggctccctgaaaggacagccaggtgacatatatcatcagacatgggcccgctactttgtgaaattccttgatgcctatgcagagcacaagctccaattctgggcagtcaccgcagaaaacgagccctcagctgggctgctgtctggctacccctttcagtgcttgggctttactcctgagcatcaacgggacttcattgcccgggatttggggccaacactggccaacagcacccaccacaatgtaagactcctcatgctggatgaccagaggctgctgctccctcattgggccaaggtggtgttgacagacccagaagctgccaaatatgttcatggcatcgctgtccactggtacctggattttttggcccctgcaaaggctactctgggagagacccacagactcttccccaataccatgctgtttgcatcagaagcctgcgtggggagcaaattctgggagcagtctgttaggctgggttcctgggatcggggcatgcaatattcccatagtataataactaacctcctctaccacgtggtaggatggacagactggaatctggctttgaacccagaaggaggccccaattgggtgcgcaactttgttgacagccccatcattgtggatatcacaaaggacaccttctacaaacagcctatgttctatcatctggggcactttagcaagttcattccagagggttcccagagagtaggcttggttgcctcacagaagaatgatctggatgctgtggcactcctgcatcctgacgggagtgcagtggtggtagtactgaacaggtctagcaaagatgttcccttgactatcaaagacccagctgtgggctttctggaaaccatttcccctggatactctatccacacctatctctggagaagacagtaatga

SEQ ID NO: 846 - protein, 536 aa, synthetic construct
  REGION 1..536: note = Variant of B-Glucocerebrosidase
MEFSSPSREECPKPLSRVSIMAGSLTGLLLLQAVSWASGARPCIPKSFGYSSVVCVCNATYCDSFDPPTLPALGTFSRYESTRSGRRMELSMGPIQANGTGTGLLLTLQPEQKFQKVKGFGGAMTDAAALNILALSPPAQNLLLKSYFSEEGIGYNIIRVPMASCDFSIRTYTYADTPDDFQLHNFSLPEEDTKLKIPLIHRALQLSQRPVSLFASPWTSPTWLKTNGAVNGKGSLKGQPGDIYHQTWARYFVKFLDAYAEHKLQFWAVTAENEPSAGLLSGYPFQCLGFTPEHQRDFIARDLGPTLANSTHHNVRLLMLDDQRLLLPHWAKVVLTDPEAAKYVHGIAVHWYLDFLAPAKATLGETHRLFPNTMLFASEACVGSKFWEQSVRLGSWDRGMQYSHSIITNLLYHVVGWTDWNLALNPEGGPNWVRNFVDSPIIVDITKDTFYKQPMFYHLGHFSKFIPEGSQRVGLVASQKNDLDAVALLHPDGSAVVVVLNRSSKDVPLTIKDPAVGFLETISPGYSIHTYLWRRQ

SEQ ID NO: 847 - DNA, 1614 bp, synthetic construct
  misc_feature 1..1614: note = Variant of B-Glucocerebrosidase
  source 1..1614: mol_type = other DNA
atggagttttcttctcctagtagagaagaatgccccaagccactgagcagggtgagcatcatggctggatccctcacagggctgcttcttttgcaggcagtctcatgggcctctggagccaggccctgtattcccaagtcattcggctactcctcagtggtgtgtgtatgcaatgccacctattgtgacagtttcgatcctccaactctccctgctctgggtaccttctcccggtatgagagcacaagaagtggaagacgcatggagctctcaatgggccctatacaggctaaccacactgggacaggtctgctgctgaccctccaacctgaacagaagtttcagaaagtcaagggatttggaggagccatgactgatgcagcagcactcaacatcttggccctgtctccaccagcccagaatctgctgttgaagtcctacttctcagaggaggggattggctacaacatcatccgggttcccatggctagctgtgacttctccattaggacctatacatacgctgacacccccgatgattttcagctccataatttcagtctccctgaagaagacaccaaactgaagatacctctgattcacagagccttgcaactgtcccaaaggccagtgagcctcttcgcttctccctggactagtcctacatggctgaagactaatggtgctgttaatgggaaaggctccctgaaaggacagccaggtgacatatatcatcagacatgggcccgctactttgtgaaattccttgatgcctatgcagagcacaagctccaattctgggcagtcaccgcagaaaacgagccctcagctgggctgctgtctggctacccctttcagtgcttgggctttactcctgagcatcaacgggacttcattgcccgggatttggggccaacactggccaacagcacccaccacaatgtaagactcctcatgctggatgaccagaggctgctgctccctcattgggccaaggtggtgttgacagacccagaagctgccaaatatgttcatggcatcgctgtccactggtacctggattttttggcccctgcaaaggctactctgggagagacccacagactcttccccaataccatgctgtttgcatcagaagcctgcgtggggagcaaattctgggagcagtctgttaggctgggttcctgggatcggggcatgcaatattcccatagtataataactaacctcctctaccacgtggtaggatggacagactggaatctggctttgaacccagaaggaggccccaattgggtgcgcaactttgttgacagccccatcattgtggatatcacaaaggacaccttctacaaacagcctatgttctatcatctggggcactttagcaagttcattccagagggttcccagagagtaggcttggttgcctcacagaagaatgatctggatgctgtggcactcctgcatcctgacgggagtgcagtggtggtagtactgaacaggtctactaaagatgttcccttgactatcaaagacccagctgtgggctttctggaaaccatttcccctggatactctatccacacctatctctggagaagacagtaatga

SEQ ID NO: 848 - protein, 536 aa, synthetic construct
  REGION 1..536: note = Variant of B-Glucocerebrosidase
MEFSSPSREECPKPLSRVSIMAGSLTGLLLLQAVSWASGARPCIPKSFGYSSVVCVCNATYCDSFDPPTLPALGTFSRYESTRSGRRMELSMGPIQANHTGTGLLLTLQPEQKFQKVKGFGGAMTDAAALNILALSPPAQNLLLKSYFSEEGIGYNIIRVPMASCDFSIRTYTYADTPDDFQLHNFSLPEEDTKLKIPLIHRALQLSQRPVSLFASPWTSPTWLKTNGAVNGKGSLKGQPGDIYHQTWARYFVKFLDAYAEHKLQFWAVTAENEPSAGLLSGYPFQCLGFTPEHQRDFIARDLGPTLANSTHHNVRLLMLDDQRLLLPHWAKVVLTDPEAAKYVHGIAVHWYLDFLAPAKATLGETHRLFPNTMLFASEACVGSKFWEQSVRLGSWDRGMQYSHSIITNLLYHVVGWTDWNLALNPEGGPNWVRNFVDSPIIVDITKDTFYKQPMFYHLGHFSKFIPEGSQRVGLVASQKNDLDAVALLHPDGSAVVVVLNRSTKDVPLTIKDPAVGFLETISPGYSIHTYLWRRQ

SEQ ID NO: 849 - DNA, 1614 bp, synthetic construct
  misc_feature 1..1614: note = Variant of B-Glucocerebrosidase
  source 1..1614: mol_type = other DNA
atggagttttcttctcctagtagagaagaatgccccaagccactgagcagggtgagcatcatggctggatccctcacagggctgcttcttttgcaggcagtctcatgggcctctggagccaggccctgtattcccaagtcattcggctactcctcagtggtgtgtgtatgcaatgccacctattgtgacagtttcgatcctccaactctccctgctctgggtaccttctcccggtatgagagcacaagaagtggaagacgcatggagctctcaatgggcccaataggtgctaaccacactgggacaggtctgctgctgaccctccaacctgaacagaagtttcagaaagtcaagggatttggaggagccatgactgatgcagcagcactcaacatcttggccctgtctccaccagcccagaatctgctgttgaagtcctacttctcagaggaggggattggctacaacatcatccgggttcccatggctagctgtgacttctccattaggacctatacatacgctgacacccccgatgattttcagctccataatttcagtctccctgaagaagacaccaaactgaagatacctctgattcacagagccttgcaactgtcccaaaggccagtgagcctcttcgcttctccctggactagtcctacatggctgaagactaatggtgctgttaatgggaaaggctccctgaaaggacagccaggtgacatatatcatcagacatgggcccgctactttgtgaaattccttgatgcctatgcagagcacaagctccaattctgggcagtcaccgcagaaaacgagccctcagctgggctgctgtctggctacccctttcagtgcttgggctttactcctgagcatcaacgggacttcattgcccgggatttggggccaacactggccaacagcacccaccacaatgtaagactcctcatgctggatgaccagaggctgctgctccctcattgggccaaggtggtgttgacagacccagaagctgccaaatatgttcatggcatcgctgtccactggtacctggattttttggcccctgcaaaggctactctgggagagacccacagactcttccccaataccatgctgtttgcatcagaagcctgcgtggggagcaaattctgggagcagtctgttaggctgggttcctgggatcggggcatgcaatattcccatagtataataactaacctcctctaccacgtggtaggatggacagactggaatctggctttgaacccagaaggaggccccaattgggtgcgcaactttgttgacagccccatcattgtggatatcacaaaggacaccttctacaaacagcctatgttctatcatctggggcactttagcaagttcattccagagggttcccagagagtaggcttggttgcctcacagaagaatgatctggatgctgtggcactcctgcatcctgacgggagtgcagtggtggtagtactgaacaggtctagcaaagatgttcccttgactatcaaagacccagctgtgggctttctggaaaccatttcccctggatactctatccacacctatctctggagaagacagtaatga

SEQ ID NO: 850 - protein, 536 aa, synthetic construct
  REGION 1..536: note = Variant of B-Glucocerebrosidase
MEFSSPSREECPKPLSRVSIMAGSLTGLLLLQAVSWASGARPCIPKSFGYSSVVCVCNATYCDSFDPPTLPALGTFSRYESTRSGRRMELSMGPIGANHTGTGLLLTLQPEQKFQKVKGFGGAMTDAAALNILALSPPAQNLLLKSYFSEEGIGYNIIRVPMASCDFSIRTYTYADTPDDFQLHNFSLPEEDTKLKIPLIHRALQLSQRPVSLFASPWTSPTWLKTNGAVNGKGSLKGQPGDIYHQTWARYFVKFLDAYAEHKLQFWAVTAENEPSAGLLSGYPFQCLGFTPEHQRDFIARDLGPTLANSTHHNVRLLMLDDQRLLLPHWAKVVLTDPEAAKYVHGIAVHWYLDFLAPAKATLGETHRLFPNTMLFASEACVGSKFWEQSVRLGSWDRGMQYSHSIITNLLYHVVGWTDWNLALNPEGGPNWVRNFVDSPIIVDITKDTFYKQPMFYHLGHFSKFIPEGSQRVGLVASQKNDLDAVALLHPDGSAVVVVLNRSSKDVPLTIKDPAVGFLETISPGYSIHTYLWRRQ

SEQ ID NO: 851 - DNA, 1614 bp, synthetic construct
  misc_feature 1..1614: note = Variant of B-Glucocerebrosidase
  source 1..1614: mol_type = other DNA
atggagttttcttctcctagtagagaagaatgccccaagccactgagcagggtgagcatcatggctggatccctcacagggctgcttcttttgcaggcagtctcatgggcctctggagccaggccctgtattcccaagtcattcggctactcctcagtggtgtgtgtatgcaatgccacctattgtgacagtttcgatcctccaactctccctgctctgggtaccttctcccggtatgagagcacaagaagtggaagacgcatggagctctcaatgggcccaatacagatgaaccacactgggacaggtctgctgctgaccctccaacctgaacagaagtttcagaaagtcaagggatttggaggagccatgactgatgcagcagcactcaacatcttggccctgtctccaccagcccagaatctgctgttgaagtcctacttctcagaggaggggattggctacaacatcatccgggttcccatggctagctgtgacttctccattaggacctatacatacgctgacacccccgatgattttcagctccataatttcagtctccctgaagaagacaccaaactgaagatacctctgattcacagagccttgcaactgtcccaaaggccagtgagcctcttcgcttctccctggactagtcctacatggctgaagactaatggtgctgttaatgggaaaggctccctgaaaggacagccaggtgacatatatcatcagacatgggcccgctactttgtgaaattccttgatgcctatgcagagcacaagctccaattctgggcagtcaccgcagaaaacgagccctcagctgggctgctgtctggctacccctttcagtgcttgggctttactcctgagcatcaacgggacttcattgcccgggatttggggccaacactggccaacagcacccaccacaatgtaagactcctcatgctggatgaccagaggctgctgctccctcattgggccaaggtggtgttgacagacccagaagctgccaaatatgttcatggcatcgctgtccactggtacctggattttttggcccctgcaaaggctactctgggagagacccacagactcttccccaataccatgctgtttgcatcagaagcctgcgtggggagcaaattctgggagcagtctgttaggctgggttcctgggatcggggcatgcaatattcccatagtataataactaacctcctctaccacgtggtaggatggacagactggaatctggctttgaacccagaaggaggccccaattgggtgcgcaactttgttgacagccccatcattgtggatatcacaaaggacaccttctacaaacagcctatgttctatcatctggggcactttagcaagttcattccagagggttcccagagagtaggcttggttgcctcacagaagaatgatctggatgctgtggcactcctgcatcctgacgggagtgcagtggtggtagtactgaacaggtctagcaaagatgttcccttgactatcaaagacccagctgtgggctttctggaaaccatttcccctggatactctatccacacctatctctggagaagacagtaatga

SEQ ID NO: 852 - protein, 536 aa, synthetic construct
  REGION 1..536: note = Variant of B-Glucocerebrosidase
MEFSSPSREECPKPLSRVSIMAGSLTGLLLLQAVSWASGARPCIPKSFGYSSVVCVCNATYCDSFDPPTLPALGTFSRYESTRSGRRMELSMGPIQMNHTGTGLLLTLQPEQKFQKVKGFGGAMTDAAALNILALSPPAQNLLLKSYFSEEGIGYNIIRVPMASCDFSIRTYTYADTPDDFQLHNFSLPEEDTKLKIPLIHRALQLSQRPVSLFASPWTSPTWLKTNGAVNGKGSLKGQPGDIYHQTWARYFVKFLDAYAEHKLQFWAVTAENEPSAGLLSGYPFQCLGFTPEHQRDFIARDLGPTLANSTHHNVRLLMLDDQRLLLPHWAKVVLTDPEAAKYVHGIAVHWYLDFLAPAKATLGETHRLFPNTMLFASEACVGSKFWEQSVRLGSWDRGMQYSHSIITNLLYHVVGWTDWNLALNPEGGPNWVRNFVDSPIIVDITKDTFYKQPMFYHLGHFSKFIPEGSQRVGLVASQKNDLDAVALLHPDGSAVVVVLNRSSKDVPLTIKDPAVGFLETISPGYSIHTYLWRRQ

SEQ ID NO: 853 - DNA, 1614 bp, synthetic construct
  misc_feature 1..1614: note = Variant of B-Glucocerebrosidase
  source 1..1614: mol_type = other DNA
atggagttttcttctcctagtagagaagaatgccccaagccactgagcagggtgagcatcatggctggatccctcacagggctgcttcttttgcaggcagtctcatgggcctctggagccaggccctgtattcccaagtcattcggctactcctcagtggtgtgtgtatgcaatgccacctattgtgacagtttcgatcctccaactctccctgctctgggtaccttctcccggtatgagagcacaagaagtggaagacgcatggagctctcaatgggccctatacaggctaaccacactgggacaggtctgctgctgaccctcttgcctgaacagaagtttcagaaagtcaagggatttggaggagccatgactgatgcagcagcactcaacatcttggccctgtctccaccagcccagaatctgctgttgaagtcctacttctcagaggaggggattggctacaacatcatccgggttcccatggctagctgtgacttctccattaggacctatacatacgctgacacccccgatgattttcagctccataatttcagtctccctgaagaagacaccaaactgaagatacctctgattcacagagccttgcaactgtcccaaaggccagtgagcctcttcgcttctccctggactagtcctacatggctgaagactaatggtgctgttaatgggaaaggctccctgaaaggacagccaggtgacatatatcatcagacatgggcccgctactttgtgaaattccttgatgcctatgcagagcacaagctccaattctgggcagtcaccgcagaaaacgagccctcagctgggctgctgtctggctacccctttcagtgcttgggctttactcctgagcatcaacgggacttcattgcccgggatttggggccaacactggccaacagcacccaccacaatgtaagactcctcatgctggatgaccagaggctgctgctccctcattgggccaaggtggtgttgacagacccagaagctgccaaatatgttcatggcatcgctgtccactggtacctggattttttggcccctgcaaaggctactctgggagagacccacagactcttccccaataccatgctgtttgcatcagaagcctgcgtggggagcaaattctgggagcagtctgttaggctgggttcctgggatcggggcatgcaatattcccatagtataataactaacctcctctaccacgtggtaggatggacagactggaatctggctttgaacccagaaggaggccccaattgggtgcgcaactttgttgacagccccatcattgtggatatcacaaaggacaccttctacaaacagcctatgttctatcatctggggcactttagcaagttcattccagagggttcccagagagtaggcttggttgcctcacagaagaatgatctggatgctgtggcactcctgcatcctgacgggagtgcagtggtggtagtactgaacaggtctagcaaagatgttcccttgactatcaaagacccagctgtgggctttctggaaaccatttcccctggatactctatccacacctatctctggagaagacagtaatga

SEQ ID NO: 854 - protein, 536 aa, synthetic construct
  REGION 1..536: note = Variant of B-Glucocerebrosidase
MEFSSPSREECPKPLSRVSIMAGSLTGLLLLQAVSWASGARPCIPKSFGYSSVVCVCNATYCDSFDPPTLPALGTFSRYESTRSGRRMELSMGPIQANHTGTGLLLTLLPEQKFQKVKGFGGAMTDAAALNILALSPPAQNLLLKSYFSEEGIGYNIIRVPMASCDFSIRTYTYADTPDDFQLHNFSLPEEDTKLKIPLIHRALQLSQRPVSLFASPWTSPTWLKTNGAVNGKGSLKGQPGDIYHQTWARYFVKFLDAYAEHKLQFWAVTAENEPSAGLLSGYPFQCLGFTPEHQRDFIARDLGPTLANSTHHNVRLLMLDDQRLLLPHWAKVVLTDPEAAKYVHGIAVHWYLDFLAPAKATLGETHRLFPNTMLFASEACVGSKFWEQSVRLGSWDRGMQYSHSIITNLLYHVVGWTDWNLALNPEGGPNWVRNFVDSPIIVDITKDTFYKQPMFYHLGHFSKFIPEGSQRVGLVASQKNDLDAVALLHPDGSAVVVVLNRSSKDVPLTIKDPAVGFLETISPGYSIHTYLWRRQ

SEQ ID NO: 855 - DNA, 1614 bp, synthetic construct
  misc_feature 1..1614: note = Variant of B-Glucocerebrosidase
  source 1..1614: mol_type = other DNA
atggagttttcttctcctagtagagaagaatgccccaagccactgagcagggtgagcatcatggctggatccctcacagggctgcttcttttgcaggcagtctcatgggcctctggagccaggccctgtattcccaagtcattcggctactcctcagtggtgtgtgtatgcaatgccacctattgtgacagtttcgatcctccaactctccctgctctgggtaccttctcccggtatgagagcacaagaagtggaagacgcatggagctctcaatgggccctatacaggctaaccacactgggacaggtctgctgctgaccctccaacctgaacagaagtttcagaaagtcaagggatttggaggagccatgactgatgcagcagcactcaacatcttggccctgtctccaccagcccagaatctgctgttgaagtcctacttctcagaggaggggattggctacaacatcatccgggttcccatggctagctgtgacttctccattaggacctatacatacgctgacacccccgatgattttcagctccataatttcagtctccctgaagaagacaccaaactgaagatacctctgattcacagagccttgcaactgtcccaaaggccagtgagcctcttcgcttctccctggactagtcctacatggctgaagactaatggtgctgttaatgggaaaggctccctgaaaggacagccaggtgacatatatcatcagacatgggcccgctactttgtgaaattccttgatgcctatgcagagcacaagctccaattctgggcagtcaccgcagaaaacgagccctcagctgggctgctgtctggctacccctttcagtgcttgggctttactcctgagcatcaacgggacttcattgcccgggatttggggccaacactggccaacagcacccaccacaatgtaagactcctcatgctggatgaccagaggctgctgctccctcattgggccaaggtggtgttgacagacccagaagctgccaaatatgttcatggcatcgctgtccactggtacctggattttttggcccctgcaaaggctactctgggagagacccacagactcttccccaataccatgctgtttgcatcagaagcctgcgtggggagcaaattctgggagcagtctgttaggctgggttcctgggatcggggcatgcaatattcccatagtataataactaacctcctctaccacgtggtaggatggacagactggaatctggctttgaacccagaaggaggccccaattgggtgcgcaactttgttgacagccccatcattgtggatatcacaaaggacaccttctacaaacagcctatgttctatcatctggggcactttagcaagttcattccagagggttcccagagagtaggcttggttgcctcacagaagaatgatctggatgctgtggcactcctgcatcctgacgggagtgcagtggtggtagtactgaacaggtctagcaaagatgttcccttgactatcaaagacccaggggtgggctttctggaaaccatttcccctggatactctatccacacctatctctggagaagacagtaatga

SEQ ID NO: 856 - protein, 536 aa, synthetic construct
  REGION 1..536: note = Variant of B-Glucocerebrosidase
MEFSSPSREECPKPLSRVSIMAGSLTGLLLLQAVSWASGARPCIPKSFGYSSVVCVCNATYCDSFDPPTLPALGTFSRYESTRSGRRMELSMGPIQANHTGTGLLLTLQPEQKFQKVKGFGGAMTDAAALNILALSPPAQNLLLKSYFSEEGIGYNIIRVPMASCDFSIRTYTYADTPDDFQLHNFSLPEEDTKLKIPLIHRALQLSQRPVSLFASPWTSPTWLKTNGAVNGKGSLKGQPGDIYHQTWARYFVKFLDAYAEHKLQFWAVTAENEPSAGLLSGYPFQCLGFTPEHQRDFIARDLGPTLANSTHHNVRLLMLDDQRLLLPHWAKVVLTDPEAAKYVHGIAVHWYLDFLAPAKATLGETHRLFPNTMLFASEACVGSKFWEQSVRLGSWDRGMQYSHSIITNLLYHVVGWTDWNLALNPEGGPNWVRNFVDSPIIVDITKDTFYKQPMFYHLGHFSKFIPEGSQRVGLVASQKNDLDAVALLHPDGSAVVVVLNRSSKDVPLTIKDPGVGFLETISPGYSIHTYLWRRQ

SEQ ID NO: 857 - DNA, 1614 bp, synthetic construct
  misc_feature 1..1614: note = Variant of B-Glucocerebrosidase
  source 1..1614: mol_type = other DNA
atggagttttcttctcctagtagagaagaatgccccaagccactgagcagggtgagcatcatggctggatccctcacagggctgcttcttttgcaggcagtctcatgggcctctggagccaggccctgtattcccaagtcattcggctactcctcagtggtgtgtgtatgcaatgccacctattgtgacagtttcgatcctccaactctccctgctctgggtaccttctcccggtatgagagcacaagaagtggaagacgcatggagctctcaatgggccctatacaggctaaccacactgggacaggtctgctgctgaccctccaacctgaacagaagtttcagaaagtcaagggatttggaggagccatgactgatgcagcagcactcaacatcttggccctgtctccaccagcccagaatctgctgttgaagtcctacttctcagaggaggggattggctacaacatcatccgggttcccatggctagctgtgacttctccattaggacctatacatacgctgacacccccgatgattttcagctccataatttcagtctccctgaagaagacaccaaactgaagatacctctgattcacagagccttgcaactgtcccaaaggccagtgagcctcttcgcttctccctggactagtcctacatggctgaagactaatggtgctgttaatgggggtggctccctgaaaggacagccaggtgacatatatcatcagacatgggcccgctactttgtgaaattccttgatgcctatgcagagcacaagctccaattctgggcagtcaccgcagaaaacgagccctcagctgggctgctgtctggctacccctttcagtgcttgggctttactcctgagcatcaacgggacttcattgcccgggatttggggccaacactggccaacagcacccaccacaatgtaagactcctcatgctggatgaccagaggctgctgctccctcattgggccaaggtggtgttgacagacccagaagctgccaaatatgttcatggcatcgctgtccactggtacctggattttttggcccctgcaaaggctactctgggagagacccacagactcttccccaataccatgctgtttgcatcagaagcctgcgtggggagcaaattctgggagcagtctgttaggctgggttcctgggatcggggcatgcaatattcccatagtataataactaacctcctctaccacgtggtaggatggacagactggaatctggctttgaacccagaaggaggccccaattgggtgcgcaactttgttgacagccccatcattgtggatatcacaaaggacaccttctacaaacagcctatgttctatcatctggggcactttagcaagttcattccagagggttcccagagagtaggcttggttgcctcacagaagaatgatctggatgctgtggcactcctgcatcctgacgggagtgcagtggtggtagtactgaacaggtctagcaaagatgttcccttgactatcaaagacccagctgtgggctttctggaaaccatttcccctggatactctatccacacctatctctggagaagacagtaatga

SEQ ID NO: 858 - protein, 536 aa, synthetic construct
  REGION 1..536: note = Variant of B-Glucocerebrosidase
MEFSSPSREECPKPLSRVSIMAGSLTGLLLLQAVSWASGARPCIPKSFGYSSVVCVCNATYCDSFDPPTLPALGTFSRYESTRSGRRMELSMGPIQANHTGTGLLLTLQPEQKFQKVKGFGGAMTDAAALNILALSPPAQNLLLKSYFSEEGIGYNIIRVPMASCDFSIRTYTYADTPDDFQLHNFSLPEEDTKLKIPLIHRALQLSQRPVSLFASPWTSPTWLKTNGAVNGGGSLKGQPGDIYHQTWARYFVKFLDAYAEHKLQFWAVTAENEPSAGLLSGYPFQCLGFTPEHQRDFIARDLGPTLANSTHHNVRLLMLDDQRLLLPHWAKVVLTDPEAAKYVHGIAVHWYLDFLAPAKATLGETHRLFPNTMLFASEACVGSKFWEQSVRLGSWDRGMQYSHSIITNLLYHVVGWTDWNLALNPEGGPNWVRNFVDSPIIVDITKDTFYKQPMFYHLGHFSKFIPEGSQRVGLVASQKNDLDAVALLHPDGSAVVVVLNRSSKDVPLTIKDPAVGFLETISPGYSIHTYLWRRQ

SEQ ID NO: 859 - DNA, 1614 bp, synthetic construct
  misc_feature 1..1614: note = Variant of B-Glucocerebrosidase
  source 1..1614: mol_type = other DNA
atggagttttcttctcctagtagagaagaatgccccaagccactgagcagggtgagcatcatggctggatccctcacagggctgcttcttttgcaggcagtctcatgggcctctggagccaggccctgtattcccaagtcattcggctactcctcagtggtgtgtgtatgcaatgccacctattgtgacagtttcgatcctccaactctccctgctctgggtaccttctcccggtatgagagcacaagagcgggaagacgcatggagctctcaatgggccctatacaggctaaccacactgggacaggtctgctgctgaccctccaacctgaacagaagtttcagaaagtcaagggatttggaggagccatgactgatgcagcagcactcaacatcttggccctgtctccaccagcccagaatctgctgttgaagtcctacttctcagaggaggggattggctacaacatcatccgggttcccatggctagctgtgacttctccattaggacctatacatacgctgacacccccgatgattttcagctccataatttcagtctccctgaagaagacaccaaactgaagatacctctgattcacagagccttgcaactgtcccaaaggccagtgagcctcttcgcttctccctggactagtcctacatggctgaagactaatggtgctgttaatgggaaaggctccctgaaaggacagccaggtgacatatatcatcagacatgggcccgctactttgtgaaattccttgatgcctatgcagagcacaagctccaattctgggcagtcaccgcagaaaacgagccctcagctgggctgctgtctggctacccctttcagtgcttgggctttactcctgagcatcaacgggacttcattgcccgggatttggggccaacactggccaacagcacccaccacaatgtaagactcctcatgctggatgaccagaggctgctgctccctcattgggccaaggtggtgttgacagacccagaagctgccaaatatgttcatggcatcgctgtccactggtacctggattttttggcccctgcaaaggctactctgggagagacccacagactcttccccaataccatgctgtttgcatcagaagcctgcgtggggagcaaattctgggagcagtctgttaggctgggttcctgggatcggggcatgcaatattcccatagtataataactaacctcctctaccacgtggtaggatggacagactggaatctggctttgaacccagaaggaggccccaattgggtgcgcaactttgttgacagccccatcattgtggatatcacaaaggacaccttctacaaacagcctatgttctatcatctggggcactttagcaagttcattccagagggttcccagagagtaggcttggttgcctcacagaagaatgatctggatgctgtggcactcctgcatcctgacgggagtgcagtggtggtagtactgaacaggtctagcaaagatgttcccttgactatcaaagacccagctgtgggctttctggaaaccatttcccctggatactctatccacacctatctctggagaagacagtaatga

SEQ ID NO: 860 - protein, 536 aa, synthetic construct
  REGION 1..536: note = Variant of B-Glucocerebrosidase
MEFSSPSREECPKPLSRVSIMAGSLTGLLLLQAVSWASGARPCIPKSFGYSSVVCVCNATYCDSFDPPTLPALGTFSRYESTRAGRRMELSMGPIQANHTGTGLLLTLQPEQKFQKVKGFGGAMTDAAALNILALSPPAQNLLLKSYFSEEGIGYNIIRVPMASCDFSIRTYTYADTPDDFQLHNFSLPEEDTKLKIPLIHRALQLSQRPVSLFASPWTSPTWLKTNGAVNGKGSLKGQPGDIYHQTWARYFVKFLDAYAEHKLQFWAVTAENEPSAGLLSGYPFQCLGFTPEHQRDFIARDLGPTLANSTHHNVRLLMLDDQRLLLPHWAKVVLTDPEAAKYVHGIAVHWYLDFLAPAKATLGETHRLFPNTMLFASEACVGSKFWEQSVRLGSWDRGMQYSHSIITNLLYHVVGWTDWNLALNPEGGPNWVRNFVDSPIIVDITKDTFYKQPMFYHLGHFSKFIPEGSQRVGLVASQKNDLDAVALLHPDGSAVVVVLNRSSKDVPLTIKDPAVGFLETISPGYSIHTYLWRRQ

SEQ ID NO: 861 - DNA, 1614 bp, synthetic construct
  misc_feature 1..1614: note = Variant of B-Glucocerebrosidase
  source 1..1614: mol_type = other DNA
atggagttttcttctcctagtagagaagaatgccccaagccactgagcagggtgagcatcatggctggatccctcacagggctgcttcttttgcaggcagtctcatgggcctctggagccaggccctgtattcccaagtcattcggctactcctcagtggtgtgtgtatgcaatgccacctattgtgacagtttcgatcctccaactctccctgctctgggtaccttctcccggtatgagagcacaagaagtggaagacgcatggagctctcaatgggccctatacaggctaaccacactgggaatggtctgctgctgaccctccaacctgaacagaagtttcagaaagtcaagggatttggaggagccatgactgatgcagcagcactcaacatcttggccctgtctccaccagcccagaatctgctgttgaagtcctacttctcagaggaggggattggctacaacatcatccgggttcccatggctagctgtgacttctccattaggacctatacatacgctgacacccccgatgattttcagctccataatttcagtctccctgaagaagacaccaaactgaagatacctctgattcacagagccttgcaactgtcccaaaggccagtgagcctcttcgcttctccctggactagtcctacatggctgaagactaatggtgctgttaatgggaaaggctccctgaaaggacagccaggtgacatatatcatcagacatgggcccgctactttgtgaaattccttgatgcctatgcagagcacaagctccaattctgggcagtcaccgcagaaaacgagccctcagctgggctgctgtctggctacccctttcagtgcttgggctttactcctgagcatcaacgggacttcattgcccgggatttggggccaacactggccaacagcacccaccacaatgtaagactcctcatgctggatgaccagaggctgctgctccctcattgggccaaggtggtgttgacagacccagaagctgccaaatatgttcatggcatcgctgtccactggtacctggattttttggcccctgcaaaggctactctgggagagacccacagactcttccccaataccatgctgtttgcatcagaagcctgcgtggggagcaaattctgggagcagtctgttaggctgggttcctgggatcggggcatgcaatattcccatagtataataactaacctcctctaccacgtggtaggatggacagactggaatctggctttgaacccagaaggaggccccaattgggtgcgcaactttgttgacagccccatcattgtggatatcacaaaggacaccttctacaaacagcctatgttctatcatctggggcactttagcaagttcattccagagggttcccagagagtaggcttggttgcctcacagaagaatgatctggatgctgtggcactcctgcatcctgacgggagtgcagtggtggtagtactgaacaggtctagcaaagatgttcccttgactatcaaagacccagctgtgggctttctggaaaccatttcccctggatactctatccacacctatctctggagaagacagtaatga

SEQ ID NO: 862 - protein, 536 aa, synthetic construct
  REGION 1..536: note = Variant of B-Glucocerebrosidase
MEFSSPSREECPKPLSRVSIMAGSLTGLLLLQAVSWASGARPCIPKSFGYSSVVCVCNATYCDSFDPPTLPALGTFSRYESTRSGRRMELSMGPIQANHTGNGLLLTLQPEQKFQKVKGFGGAMTDAAALNILALSPPAQNLLLKSYFSEEGIGYNIIRVPMASCDFSIRTYTYADTPDDFQLHNFSLPEEDTKLKIPLIHRALQLSQRPVSLFASPWTSPTWLKTNGAVNGKGSLKGQPGDIYHQTWARYFVKFLDAYAEHKLQFWAVTAENEPSAGLLSGYPFQCLGFTPEHQRDFIARDLGPTLANSTHHNVRLLMLDDQRLLLPHWAKVVLTDPEAAKYVHGIAVHWYLDFLAPAKATLGETHRLFPNTMLFASEACVGSKFWEQSVRLGSWDRGMQYSHSIITNLLYHVVGWTDWNLALNPEGGPNWVRNFVDSPIIVDITKDTFYKQPMFYHLGHFSKFIPEGSQRVGLVASQKNDLDAVALLHPDGSAVVVVLNRSSKDVPLTIKDPAVGFLETISPGYSIHTYLWRRQ

SEQ ID NO: 863 - DNA, 1614 bp, synthetic construct
  misc_feature 1..1614: note = Variant of B-Glucocerebrosidase
  source 1..1614: mol_type = other DNA
atggagttttcttctcctagtagagaagaatgccccaagccactgagcagggtgagcatcatggctggatccctcacagggctgcttcttttgcaggcagtctcatgggcctctggagccaggccctgtattcccaagtcattcggctactcctcagtggtgtgtgtatgcaatgccacctattgtgacagtttcgatcctccaactctccctgctctgggtaccttctcccggtatgagagcacaagaagtggaagacgcatggagctctcaatgggccctatacaggctaaccacactgggacaggtctgctgctgaccctccaacctgaacagaagtttcagaaagtcaagggatttggaggagccatgactgatgcagcagcactcaacatcttggccctgtctccaccagcccagaatctgctgttgaagtcctacttctcagaggaggggattggctacaacatcatccgggttcccatggctagctgtgacttctccattaggacctatacatacgctgacacccccgatgattttcagctccataatttcagtctccctgaagaagacaccaaactgaagatacctctgattcacagagccttgcaactgtcccaaaggccagtgagcctcttcgcttctccctggactagtcctacatggctgaagactaatggtgctgttaatgggaaaggctccctgaaaggacagccaggtgacatatatcatcagacatgggcccgctactttgtgaaattccttgatgcctatgcagagcacaagctccaattctgggcagtcaccgcagaaaacgagccctcagctgggctgctgtctggctacccctttcagtgcttgggctttactcctgagcatcaacgggacttcattgcccgggatttggggccaacactggccaacagcacccaccacaatgtaagactcctcatgctggatgaccagaggctgctgctccctcattgggccaaggtggtgttgacagacccagaagctgccaaatatgttcatggcatcgctgtccactggtacctggattttttggcccctgcaaaggctactctgggagagacccacagactcttccccaataccatgctgtttgcatcagaagcctgcgtggggagcaaattctgggagcagtctgttaggctgggttcctgggatcggggcatgcaatattcccatagtataataactaacctcctctaccacgtggtaggatggacagactggaatctggctttgaacccagaaggaggccccaattgggtgcgcaactttgttgacagccccatcattgtggatatcacaaaggacaccttctacaaacagcctatgttctatcatctggggcactttagcaagttcattccagagggttcccagagagtaggcttggttgcctcacagaagaatgatctggatgctgtggcactcctgcatcctgacgggagtgcagtggtggtagtactgaacaggtcttggaaagatgttcccttgactatcaaagacccagctgtgggctttctggaaaccatttcccctggatactctatccacacctatctctggagaagacagtaatga

SEQ ID NO: 864 - protein, 536 aa, synthetic construct
  REGION 1..536: note = Variant of B-Glucocerebrosidase
MEFSSPSREECPKPLSRVSIMAGSLTGLLLLQAVSWASGARPCIPKSFGYSSVVCVCNATYCDSFDPPTLPALGTFSRYESTRSGRRMELSMGPIQANHTGTGLLLTLQPEQKFQKVKGFGGAMTDAAALNILALSPPAQNLLLKSYFSEEGIGYNIIRVPMASCDFSIRTYTYADTPDDFQLHNFSLPEEDTKLKIPLIHRALQLSQRPVSLFASPWTSPTWLKTNGAVNGKGSLKGQPGDIYHQTWARYFVKFLDAYAEHKLQFWAVTAENEPSAGLLSGYPFQCLGFTPEHQRDFIARDLGPTLANSTHHNVRLLMLDDQRLLLPHWAKVVLTDPEAAKYVHGIAVHWYLDFLAPAKATLGETHRLFPNTMLFASEACVGSKFWEQSVRLGSWDRGMQYSHSIITNLLYHVVGWTDWNLALNPEGGPNWVRNFVDSPIIVDITKDTFYKQPMFYHLGHFSKFIPEGSQRVGLVASQKNDLDAVALLHPDGSAVVVVLNRSWKDVPLTIKDPAVGFLETISPGYSIHTYLWRRQ

SEQ ID NO: 865 - DNA, 1614 bp, synthetic construct
  misc_feature 1..1614: note = Variant of B-Glucocerebrosidase
  source 1..1614: mol_type = other DNA
atggagttttcttctcctagtagagaagaatgccccaagccactgagcagggtgagcatcatggctggatccctcacagggctgcttcttttgcaggcagtctcatgggcctctggagccaggccctgtattcccaagtcattcggctactcctcagtggtgtgtgtatgcaatgccacctattgtgacagtttcgatcctccaactctccctgctctgggtaccttctcccggtatgagagcacaagaagtggaagacgcatggagctctcaatgggccctatacaggctaaccacactgggacaggtctgctgctgaccctccaacctgaacagaagtttcagaaagtcaagggatttggaggagccatgactgatgcagcagcactcaacatcttggccctgtctccaccagcccagaatctgctgttgaagtcctacttctcagaggaggggattggctacaacatcatccgggttcccatggctagctgtgacttctccattaggacctatacatacgctgacacccccgatgattttcagctccataatttcagtctccctgaagaagacaccaaactgaagatacctctgattcacagagccttgcaactgtcccaaaggccagtgagcctcttcgcttctccctggactagtcctacatggctgaagactaatggtgctgttaatgggaaaggctccctgaaaggacagccaggtgacatatatcatcagacatgggcccgctactttgtgaaattccttgatgcctatgcagagcacaagctccgtttctgggcagtcaccgcagaaaacgagccctcagctgggctgctgtctggctacccctttcagtgcttgggctttactcctgagcatcaacgggacttcattgcccgggatttggggccaacactggccaacagcacccaccacaatgtaagactcctcatgctggatgaccagaggctgctgctccctcattgggccaaggtggtgttgacagacccagaagctgccaaatatgttcatggcatcgctgtccactggtacctggattttttggcccctgcaaaggctactctgggagagacccacagactcttccccaataccatgctgtttgcatcagaagcctgcgtggggagcaaattctgggagcagtctgttaggctgggttcctgggatcggggcatgcaatattcccatagtataataactaacctcctctaccacgtggtaggatggacagactggaatctggctttgaacccagaaggaggccccaattgggtgcgcaactttgttgacagccccatcattgtggatatcacaaaggacaccttctacaaacagcctatgttctatcatctggggcactttagcaagttcattccagagggttcccagagagtaggcttggttgcctcacagaagaatgatctggatgctgtggcactcctgcatcctgacgggagtgcagtggtggtagtactgaacaggtctagcaaagatgttcccttgactatcaaagacccagctgtgggctttctggaaaccatttcccctggatactctatccacacctatctctggagaagacagtaatga

SEQ ID NO: 866 - protein, 536 aa, synthetic construct
  REGION 1..536: note = Variant of B-Glucocerebrosidase
MEFSSPSREECPKPLSRVSIMAGSLTGLLLLQAVSWASGARPCIPKSFGYSSVVCVCNATYCDSFDPPTLPALGTFSRYESTRSGRRMELSMGPIQANHTGTGLLLTLQPEQKFQKVKGFGGAMTDAAALNILALSPPAQNLLLKSYFSEEGIGYNIIRVPMASCDFSIRTYTYADTPDDFQLHNFSLPEEDTKLKIPLIHRALQLSQRPVSLFASPWTSPTWLKTNGAVNGKGSLKGQPGDIYHQTWARYFVKFLDAYAEHKLRFWAVTAENEPSAGLLSGYPFQCLGFTPEHQRDFIARDLGPTLANSTHHNVRLLMLDDQRLLLPHWAKVVLTDPEAAKYVHGIAVHWYLDFLAPAKATLGETHRLFPNTMLFASEACVGSKFWEQSVRLGSWDRGMQYSHSIITNLLYHVVGWTDWNLALNPEGGPNWVRNFVDSPIIVDITKDTFYKQPMFYHLGHFSKFIPEGSQRVGLVASQKNDLDAVALLHPDGSAVVVVLNRSSKDVPLTIKDPAVGFLETISPGYSIHTYLWRRQ

SEQ ID NO: 867 - DNA, 1614 bp, synthetic construct
  misc_feature 1..1614: note = Variant of B-Glucocerebrosidase
  source 1..1614: mol_type = other DNA
atggagttttcttctcctagtagagaagaatgccccaagccactgagcagggtgagcatcatggctggatccctcacagggctgcttcttttgcaggcagtctcatgggcctctggagccaggccctgtattcccaagtcattcggctactcctcagtggtgtgtgtatgcaatgccacctattgtgacagtttcgatcctccaactctccctgctctgggtaccttctcccggtatgagagcacaagaagtggaagacgcatggagctctcaatgggcccaatacaggctaacgtgactgggacaggtctgctgctgaccctccaacctgaacagaagtttcagaaagtcaagggatttggaggagccatgactgatgcagcagcactcaacatcttggccctgtctccaccagcccagaatctgctgttgaagtcctacttctcagaggaggggattggctacaacatcatccgggttcccatggctagctgtgacttctccattaggacctatacatacgctgacacccccgatgattttcagctccataatttcagtctccctgaagaagacaccaaactgaagatacctctgattcacagagccttgcaactgtcccaaaggccagtgagcctcttcgcttctccctggactagtcctacatggctgaagactaatggtgctgttaatgggaaaggctccctgaaaggacagccaggtgacatatatcatcagacatgggcccgctactttgtgaaattccttgatgcctatgcagagcacaagctccaattctgggcagtcaccgcagaaaacgagccctcagctgggctgctgtctggctacccctttcagtgcttgggctttactcctgagcatcaacgggacttcattgcccgggatttggggccaacactggccaacagcacccaccacaatgtaagactcctcatgctggatgaccagaggctgctgctccctcattgggccaaggtggtgttgacagacccagaagctgccaaatatgttcatggcatcgctgtccactggtacctggattttttggcccctgcaaaggctactctgggagagacccacagactcttccccaataccatgctgtttgcatcagaagcctgcgtggggagcaaattctgggagcagtctgttaggctgggttcctgggatcggggcatgcaatattcccatagtataataactaacctcctctaccacgtggtaggatggacagactggaatctggctttgaacccagaaggaggccccaattgggtgcgcaactttgttgacagccccatcattgtggatatcacaaaggacaccttctacaaacagcctatgttctatcatctggggcactttagcaagttcattccagagggttcccagagagtaggcttggttgcctcacagaagaatgatctggatgctgtggcactcctgcatcctgacgggagtgcagtggtggtagtactgaacaggtctagcaaagatgttcccttgactatcaaagacccagctgtgggctttctggaaaccatttcccctggatactctatccacacctatctctggagaagacagtaatga

SEQ ID NO: 868 - protein, 536 aa, synthetic construct
  REGION 1..536: note = Variant of B-Glucocerebrosidase
MEFSSPSREECPKPLSRVSIMAGSLTGLLLLQAVSWASGARPCIPKSFGYSSVVCVCNATYCDSFDPPTLPALGTFSRYESTRSGRRMELSMGPIQANVTGTGLLLTLQPEQKFQKVKGFGGAMTDAAALNILALSPPAQNLLLKSYFSEEGIGYNIIRVPMASCDFSIRTYTYADTPDDFQLHNFSLPEEDTKLKIPLIHRALQLSQRPVSLFASPWTSPTWLKTNGAVNGKGSLKGQPGDIYHQTWARYFVKFLDAYAEHKLQFWAVTAENEPSAGLLSGYPFQCLGFTPEHQRDFIARDLGPTLANSTHHNVRLLMLDDQRLLLPHWAKVVLTDPEAAKYVHGIAVHWYLDFLAPAKATLGETHRLFPNTMLFASEACVGSKFWEQSVRLGSWDRGMQYSHSIITNLLYHVVGWTDWNLALNPEGGPNWVRNFVDSPIIVDITKDTFYKQPMFYHLGHFSKFIPEGSQRVGLVASQKNDLDAVALLHPDGSAVVVVLNRSSKDVPLTIKDPAVGFLETISPGYSIHTYLWRRQ

SEQ ID NO: 869 - DNA, 1614 bp, synthetic construct
  misc_feature 1..1614: note = Variant of B-Glucocerebrosidase
  source 1..1614: mol_type = other DNA
atggagttttcttctcctagtagagaagaatgccccaagccactgagcagggtgagcatcatggctggatccctcacagggctgcttcttttgcaggcagtctcatgggcctctggagccaggccctgtattcccaagtcattcggctactcctcagtggtgtgtgtatgcaatgccacctattgtgacagtttcgatcctccaactctccctgctctgggtaccttctcccggtatgagagcacaagaagtggaagacgcatggagctctcaatgggccctatacaggctaaccacactgggacaggtctgctgctgaccctccaacctgaacagaagtttcagaaagtcaagggatttggaggagccatgactgatgcagcagcactcaacatcttggccctgtctccaccagcccagaatctgctgttgaagtcctacttctcagaggaggggattggctacaacatcatccgggttcccatggctagctgtgacttctccattaggacctatacatacgctgacacccccgatgattttcagctccataatttcagtctccctgaagaagacaccaaactgaagatacctctgattcacagagccttgcaactgtcccaaaggccagtgagcctcttcgcttctccctggactagtcctacatggctgaagactaatggtgctgttaatgggaaaggctccctgaaaggacagccaggtgacatatatcatcagacatgggcccgctactttgtgaaattccttgatgcctatgcagagcacaagctccaattctgggcagtcaccgcagaaaacgagccctcagctgggctgctgtctggctacccctttcagtgcttgggctttactcctgagcatcaacgggacttcattgcccgggatttggggccaacactggccaacagcacccaccacaatgtaagactcctcatgctggatgaccagaggctgctgctccctcattgggccaaggtggtgttgacagacccagaagctgccaaatatgttcatggcatcgctgtccactggtacctggattttttggcccctgcaaaggctactctgggagagacccacagactcttccccaataccatgctgtttgcatcagaagcctgcgtggggagcaaattctgggagcagtctgttaggctgggttcctgggatcggggcatgcaatattcccatagtataataactaacctcctctaccacgtggtaggatggacagactggaatctggctttgaacccagaaggaggccccaattgggtgcgcaactttgttgacagccccatcattgtggatatcacaaaggacaccttctacaaacagcctatgttctatcatctggggcactttagcaagttcattccagagggttcccagagagtaggcttggttgcctcacagaagaatgatctggatgctgtggcactcctgcatcctgacgggagtgcagtggtggtagtactgaacaggtctagcaaagatgttcccttgactatcctggacccagctgtgggctttctggaaaccatttcccctggatactctatccacacctatctctggagaagacagtaatga

SEQ ID NO: 870 - protein, 536 aa, synthetic construct
  REGION 1..536: note = Variant of B-Glucocerebrosidase
MEFSSPSREECPKPLSRVSIMAGSLTGLLLLQAVSWASGARPCIPKSFGYSSVVCVCNATYCDSFDPPTLPALGTFSRYESTRSGRRMELSMGPIQANHTGTGLLLTLQPEQKFQKVKGFGGAMTDAAALNILALSPPAQNLLLKSYFSEEGIGYNIIRVPMASCDFSIRTYTYADTPDDFQLHNFSLPEEDTKLKIPLIHRALQLSQRPVSLFASPWTSPTWLKTNGAVNGKGSLKGQPGDIYHQTWARYFVKFLDAYAEHKLQFWAVTAENEPSAGLLSGYPFQCLGFTPEHQRDFIARDLGPTLANSTHHNVRLLMLDDQRLLLPHWAKVVLTDPEAAKYVHGIAVHWYLDFLAPAKATLGETHRLFPNTMLFASEACVGSKFWEQSVRLGSWDRGMQYSHSIITNLLYHVVGWTDWNLALNPEGGPNWVRNFVDSPIIVDITKDTFYKQPMFYHLGHFSKFIPEGSQRVGLVASQKNDLDAVALLHPDGSAVVVVLNRSSKDVPLTILDPAVGFLETISPGYSIHTYLWRRQ

SEQ ID NO: 871 - DNA, 1614 bp, synthetic construct
  misc_feature 1..1614: note = Variant of B-Glucocerebrosidase
  source 1..1614: mol_type = other DNA
atggagttttcttctcctagtagagaagaatgccccaagccactgagcagggtgagcatcatggctggatccctcacagggctgcttcttttgcaggcagtctcatgggcctctggagccaggccctgtattcccaagtcattcggctactcctcagtggtgtgtgtatgcaatgccacctattgtgacagtttcgatcctccaactctccctgctctgggtaccttctcccggtatgagagcacaagaagtggaagacgcatggagctctcaatgggccctatacaggctaaccacactgggacaggtctgctgctgaccctccaacctgaacagaagtttcagaaagtcaagggatttggaggagccatgactgatgcagcagcactcaacatcttggccctgtctgtgccagcccagaatctgctgttgaagtcctacttctcagaggaggggattggctacaacatcatccgggttcccatggctagctgtgacttctccattaggacctatacatacgctgacacccccgatgattttcagctccataatttcagtctccctgaagaagacaccaaactgaagatacctctgattcacagagccttgcaactgtcccaaaggccagtgagcctcttcgcttctccctggactagtcctacatggctgaagactaatggtgctgttaatgggaaaggctccctgaaaggacagccaggtgacatatatcatcagacatgggcccgctactttgtgaaattccttgatgcctatgcagagcacaagctccaattctgggcagtcaccgcagaaaacgagccctcagctgggctgctgtctggctacccctttcagtgcttgggctttactcctgagcatcaacgggacttcattgcccgggatttggggccaacactggccaacagcacccaccacaatgtaagactcctcatgctggatgaccagaggctgctgctccctcattgggccaaggtggtgttgacagacccagaagctgccaaatatgttcatggcatcgctgtccactggtacctggattttttggcccctgcaaaggctactctgggagagacccacagactcttccccaataccatgctgtttgcatcagaagcctgcgtggggagcaaattctgggagcagtctgttaggctgggttcctgggatcggggcatgcaatattcccatagtataataactaacctcctctaccacgtggtaggatggacagactggaatctggctttgaacccagaaggaggccccaattgggtgcgcaactttgttgacagccccatcattgtggatatcacaaaggacaccttctacaaacagcctatgttctatcatctggggcactttagcaagttcattccagagggttcccagagagtaggcttggttgcctcacagaagaatgatctggatgctgtggcactcctgcatcctgacgggagtgcagtggtggtagtactgaacaggtctagcaaagatgttcccttgactatcaaagacccagctgtgggctttctggaaaccatttcccctggatactctatccacacctatctctggagaagacagtaatga

SEQ ID NO: 872 - protein, 536 aa, synthetic construct
  REGION 1..536: note = Variant of B-Glucocerebrosidase
MEFSSPSREECPKPLSRVSIMAGSLTGLLLLQAVSWASGARPCIPKSFGYSSVVCVCNATYCDSFDPPTLPALGTFSRYESTRSGRRMELSMGPIQANHTGTGLLLTLQPEQKFQKVKGFGGAMTDAAALNILALSVPAQNLLLKSYFSEEGIGYNIIRVPMASCDFSIRTYTYADTPDDFQLHNFSLPEEDTKLKIPLIHRALQLSQRPVSLFASPWTSPTWLKTNGAVNGKGSLKGQPGDIYHQTWARYFVKFLDAYAEHKLQFWAVTAENEPSAGLLSGYPFQCLGFTPEHQRDFIARDLGPTLANSTHHNVRLLMLDDQRLLLPHWAKVVLTDPEAAKYVHGIAVHWYLDFLAPAKATLGETHRLFPNTMLFASEACVGSKFWEQSVRLGSWDRGMQYSHSIITNLLYHVVGWTDWNLALNPEGGPNWVRNFVDSPIIVDITKDTFYKQPMFYHLGHFSKFIPEGSQRVGLVASQKNDLDAVALLHPDGSAVVVVLNRSSKDVPLTIKDPAVGFLETISPGYSIHTYLWRRQ

SEQ ID NO: 873 - DNA, 1614 bp, synthetic construct
  misc_feature 1..1614: note = Variant of B-Glucocerebrosidase
  source 1..1614: mol_type = other DNA
atggagttttcttctcctagtagagaagaatgccccaagccactgagcagggtgagcatcatggctggatccctcacagggctgcttcttttgcaggcagtctcatgggcctctggagccaggccctgtattcccaagtcattcggctactcctcagtggtgtgtgtatgcaatgccacctattgtgacagtttcgatcctccaactctccctgctctgggtaccttctcccggtatgagagcacaagaagtggaagacgcatggagctctcaatgggccctatacaggctaaccacactgggacaggtctgctgctgaccctccaacctgaacagaagtttcagaaagtcaagggatttggaggagccatgactgatgcagcagcactcaacatcttggccctgtctccaccagcccagaatctgctgttgaagtcctacttctcagaggaggggattggctacaacatcatccgggttcccatggctagctgtgacttctccattaggacctatacatacgctgacacccccgatgattttcagctccataatttcagtctccctgaagaagacaccaaactgaagatacctctgattcacagagccttgcaactgtcccaaaggccagtgagcctcttcgcttctccctggactagtcctacatggctgaagactaatggtgctgttaatgggaaaggctccctgaaaggacagccaggtgacatatatcatcagacatgggcccgctactttgtgaaattccttgatgcctatgcagagcacaagctccaattctgggcagtcaccgcagaaaacgagccctcagctgggctgctgtctggctacccctttcagtgcttgggctttactcctgagcatcaacgggacttcattgcccgggatttggggccaacactggccaacagcacccaccacaatgtaagactcctcatgctggatgaccagaggctgctgctccctcattgggccaaggtggtgttgacagacccagaagctgccaaatatgttcatggcatcgctgtccactggtacctggattttttggcccctgcaaaggctactctgggagagacccacagactcttccccaataccatgctgtttgcatcagaagcctgcgtggggagcaaattctgggagcagtctgttaggctgggttcctgggatcggggcatgcaatattcccatagtataataactaacctcctctaccacgtggtaggatggacagactggaatctggctttgaacccagaaggaggccccaattgggtgcgcaactttgttgacagccccatcattgtggatatcacaaaggacaccttctacaaacagcctatgttctatcatctggggcactttagcaagttcattccagagggttcccagagagtaggcttggttgcctcacagaagaatgatctggatgctgtggcactcctgcatcctgacgggagtgcagtggtggtagtactgaacaggtctagcaaagatgttcccttgactatcaaagacccagctgtgggctttctggaaaccatttcccctggatactctatccacacctatctctggagaagagcgtaatga

SEQ ID NO: 874 - protein, 536 aa, synthetic construct
  REGION 1..536: note = Variant of B-Glucocerebrosidase
MEFSSPSREECPKPLSRVSIMAGSLTGLLLLQAVSWASGARPCIPKSFGYSSVVCVCNATYCDSFDPPTLPALGTFSRYESTRSGRRMELSMGPIQANHTGTGLLLTLQPEQKFQKVKGFGGAMTDAAALNILALSPPAQNLLLKSYFSEEGIGYNIIRVPMASCDFSIRTYTYADTPDDFQLHNFSLPEEDTKLKIPLIHRALQLSQRPVSLFASPWTSPTWLKTNGAVNGKGSLKGQPGDIYHQTWARYFVKFLDAYAEHKLQFWAVTAENEPSAGLLSGYPFQCLGFTPEHQRDFIARDLGPTLANSTHHNVRLLMLDDQRLLLPHWAKVVLTDPEAAKYVHGIAVHWYLDFLAPAKATLGETHRLFPNTMLFASEACVGSKFWEQSVRLGSWDRGMQYSHSIITNLLYHVVGWTDWNLALNPEGGPNWVRNFVDSPIIVDITKDTFYKQPMFYHLGHFSKFIPEGSQRVGLVASQKNDLDAVALLHPDGSAVVVVLNRSSKDVPLTIKDPAVGFLETISPGYSIHTYLWRRA

SEQ ID NO: 875 - DNA, 1614 bp, synthetic construct
  misc_feature 1..1614: note = Variant of B-Glucocerebrosidase
  source 1..1614: mol_type = other DNA
atggagttttcttctcctagtagagaagaatgccccaagccactgagcagggtgagcatcatggctggatccctcacagggctgcttcttttgcaggcagtctcatgggcctctggagccaggccctgtattcccaagtcattcggctactcctcagtggtgtgtgtatgcaatgccacctattgtgacagtttcgatcctccaactctccctgctctgggtaccttctcccggtatgagagcacaagaagtggaagacgcatggagctctcaatgggccctatacaggctaaccacactgggacaggtctgctgctgaccctccaacctgaacagaggtttcagaaagtcaagggatttggaggagccatgactgatgcagcagcactcaacatcttggccctgtctccaccagcccagaatctgctgttgaagtcctacttctcagaggaggggattggctacaacatcatccgggttcccatggctagctgtgacttctccattaggacctatacatacgctgacacccccgatgattttcagctccataatttcagtctccctgaagaagacaccaaactgaagatacctctgattcacagagccttgcaactgtcccaaaggccagtgagcctcttcgcttctccctggactagtcctacatggctgaagactaatggtgctgttaatgggaaaggctccctgaaaggacagccaggtgacatatatcatcagacatgggcccgctactttgtgaaattccttgatgcctatgcagagcacaagctccaattctgggcagtcaccgcagaaaacgagccctcagctgggctgctgtctggctacccctttcagtgcttgggctttactcctgagcatcaacgggacttcattgcccgggatttggggccaacactggccaacagcacccaccacaatgtaagactcctcatgctggatgaccagaggctgctgctccctcattgggccaaggtggtgttgacagacccagaagctgccaaatatgttcatggcatcgctgtccactggtacctggattttttggcccctgcaaaggctactctgggagagacccacagactcttccccaataccatgctgtttgcatcagaagcctgcgtggggagcaaattctgggagcagtctgttaggctgggttcctgggatcggggcatgcaatattcccatagtataataactaacctcctctaccacgtggtaggatggacagactggaatctggctttgaacccagaaggaggccccaattgggtgcgcaactttgttgacagccccatcattgtggatatcacaaaggacaccttctacaaacagcctatgttctatcatctggggcactttagcaagttcattccagagggttcccagagagtaggcttggttgcctcacagaagaatgatctggatgctgtggcactcctgcatcctgacgggagtgcagtggtggtagtactgaacaggtctagcaaagatgttcccttgactatcaaagacccagctgtgggctttctggaaaccatttcccctggatactctatccacacctatctctggagaagacagtaatga

SEQ ID NO: 876 - protein, 536 aa, synthetic construct
  REGION 1..536: note = Variant of B-Glucocerebrosidase
MEFSSPSREECPKPLSRVSIMAGSLTGLLLLQAVSWASGARPCIPKSFGYSSVVCVCNATYCDSFDPPTLPALGTFSRYESTRSGRRMELSMGPIQANHTGTGLLLTLQPEQRFQKVKGFGGAMTDAAALNILALSPPAQNLLLKSYFSEEGIGYNIIRVPMASCDFSIRTYTYADTPDDFQLHNFSLPEEDTKLKIPLIHRALQLSQRPVSLFASPWTSPTWLKTNGAVNGKGSLKGQPGDIYHQTWARYFVKFLDAYAEHKLQFWAVTAENEPSAGLLSGYPFQCLGFTPEHQRDFIARDLGPTLANSTHHNVRLLMLDDQRLLLPHWAKVVLTDPEAAKYVHGIAVHWYLDFLAPAKATLGETHRLFPNTMLFASEACVGSKFWEQSVRLGSWDRGMQYSHSIITNLLYHVVGWTDWNLALNPEGGPNWVRNFVDSPIIVDITKDTFYKQPMFYHLGHFSKFIPEGSQRVGLVASQKNDLDAVALLHPDGSAVVVVLNRSSKDVPLTIKDPAVGFLETISPGYSIHTYLWRRQ

SEQ ID NO: 877 - DNA, 1614 bp, synthetic construct
  misc_feature 1..1614: note = Variant of B-Glucocerebrosidase
  source 1..1614: mol_type = other DNA
atggagttttcttctcctagtagagaagaatgccccaagccactgagcagggtgagcatcatggctggatccctcacagggctgcttcttttgcaggcagtctcatgggcctctggagccaggccctgtattcccaagtcattcggctactcctcagtggtgtgtgtatgcaatgccacctattgtgacagtttcgatcctccaactctccctgctctgggtaccttctcccggtatgagagcacaagaagtggaagacgcatggagctctcaatgggccctatacaggctaaccacactgggacaggtctgctgctgaccctccaacctgaacagaagtttcagaaagtcaagggatttggaggagccatgactgatgcagcagcactcaacatcttggccctgtctccaccagcccagaatctgctgttgaagtcctacttctcagaggaggggattggctacaacatcatccgggttcccatggctagctgtgacttctccattaggccttatacatacgctgacacccccgatgattttcagctccataatttcagtctccctgaagaagacaccaaactgaagatacctctgattcacagagccttgcaactgtcccaaaggccagtgagcctcttcgcttctccctggactagtcctacatggctgaagactaatggtgctgttaatgggaaaggctccctgaaaggacagccaggtgacatatatcatcagacatgggcccgctactttgtgaaattccttgatgcctatgcagagcacaagctccaattctgggcagtcaccgcagaaaacgagccctcagctgggctgctgtctggctacccctttcagtgcttgggctttactcctgagcatcaacgggacttcattgcccgggatttggggccaacactggccaacagcacccaccacaatgtaagactcctcatgctggatgaccagaggctgctgctccctcattgggccaaggtggtgttgacagacccagaagctgccaaatatgttcatggcatcgctgtccactggtacctggattttttggcccctgcaaaggctactctgggagagacccacagactcttccccaataccatgctgtttgcatcagaagcctgcgtggggagcaaattctgggagcagtctgttaggctgggttcctgggatcggggcatgcaatattcccatagtataataactaacctcctctaccacgtggtaggatggacagactggaatctggctttgaacccagaaggaggccccaattgggtgcgcaactttgttgacagccccatcattgtggatatcacaaaggacaccttctacaaacagcctatgttctatcatctggggcactttagcaagttcattccagagggttcccagagagtaggcttggttgcctcacagaagaatgatctggatgctgtggcactcctgcatcctgacgggagtgcagtggtggtagtactgaacaggtctagcaaagatgttcccttgactatcaaagacccagctgtgggctttctggaaaccatttcccctggatactctatccacacctatctctggagaagacagtaatga

SEQ ID NO: 878 - protein, 536 aa, synthetic construct
  REGION 1..536: note = Variant of B-Glucocerebrosidase
MEFSSPSREECPKPLSRVSIMAGSLTGLLLLQAVSWASGARPCIPKSFGYSSVVCVCNATYCDSFDPPTLPALGTFSRYESTRSGRRMELSMGPIQANHTGTGLLLTLQPEQKFQKVKGFGGAMTDAAALNILALSPPAQNLLLKSYFSEEGIGYNIIRVPMASCDFSIRPYTYADTPDDFQLHNFSLPEEDTKLKIPLIHRALQLSQRPVSLFASPWTSPTWLKTNGAVNGKGSLKGQPGDIYHQTWARYFVKFLDAYAEHKLQFWAVTAENEPSAGLLSGYPFQCLGFTPEHQRDFIARDLGPTLANSTHHNVRLLMLDDQRLLLPHWAKVVLTDPEAAKYVHGIAVHWYLDFLAPAKATLGETHRLFPNTMLFASEACVGSKFWEQSVRLGSWDRGMQYSHSIITNLLYHVVGWTDWNLALNPEGGPNWVRNFVDSPIIVDITKDTFYKQPMFYHLGHFSKFIPEGSQRVGLVASQKNDLDAVALLHPDGSAVVVVLNRSSKDVPLTIKDPAVGFLETISPGYSIHTYLWRRQ

SEQ ID NO: 879 - DNA, 1614 bp, synthetic construct
  misc_feature 1..1614: note = Variant of B-Glucocerebrosidase
  source 1..1614: mol_type = other DNA
atggagttttcttctcctagtagagaagaatgccccaagccactgagcagggtgagcatcatggctggatccctcacagggctgcttcttttgcaggcagtctcatgggcctctggagccaggccctgtattcccaagtcattcggctactcctcagtggtgtgtgtatgcaatgccacctattgtgacagtttcgatcctccaactctccctgctctgggtaccttctcccggtatgagagcacaagaagtggaagacgcatggagctctcaatgggccctatacaggctaaccacactgggacaggtctgctgctgaccctccaacctgaacagaagtttcagaaagtcaagggatttggaggagccatgactgatgcagcagcactcaacatcttggccctgtctccaccagcccagaatctgctgttgaagtcctacttctcagaggaggggattggctacaacatcatccgggttcccatggctagctgtgacttctccattaggacctatacatacgctgacacccccgatgattttcagctccataatttcagtctcccttgggaagacaccaaactgaagatacctctgattcacagagccttgcaactgtcccaaaggccagtgagcctcttcgcttctccctggactagtcctacatggctgaagactaatggtgctgttaatgggaaaggctccctgaaaggacagccaggtgacatatatcatcagacatgggcccgctactttgtgaaattccttgatgcctatgcagagcacaagctccaattctgggcagtcaccgcagaaaacgagccctcagctgggctgctgtctggctacccctttcagtgcttgggctttactcctgagcatcaacgggacttcattgcccgggatttggggccaacactggccaacagcacccaccacaatgtaagactcctcatgctggatgaccagaggctgctgctccctcattgggccaaggtggtgttgacagacccagaagctgccaaatatgttcatggcatcgctgtccactggtacctggattttttggcccctgcaaaggctactctgggagagacccacagactcttccccaataccatgctgtttgcatcagaagcctgcgtggggagcaaattctgggagcagtctgttaggctgggttcctgggatcggggcatgcaatattcccatagtataataactaacctcctctaccacgtggtaggatggacagactggaatctggctttgaacccagaaggaggccccaattgggtgcgcaactttgttgacagccccatcattgtggatatcacaaaggacaccttctacaaacagcctatgttctatcatctggggcactttagcaagttcattccagagggttcccagagagtaggcttggttgcctcacagaagaatgatctggatgctgtggcactcctgcatcctgacgggagtgcagtggtggtagtactgaacaggtctagcaaagatgttcccttgactatcaaagacccagctgtgggctttctggaaaccatttcccctggatactctatccacacctatctctggagaagacagtaatga

SEQ ID NO: 880 - protein, 536 aa, synthetic construct
  REGION 1..536: note = Variant of B-Glucocerebrosidase
MEFSSPSREECPKPLSRVSIMAGSLTGLLLLQAVSWASGARPCIPKSFGYSSVVCVCNATYCDSFDPPTLPALGTFSRYESTRSGRRMELSMGPIQANHTGTGLLLTLQPEQKFQKVKGFGGAMTDAAALNILALSPPAQNLLLKSYFSEEGIGYNIIRVPMASCDFSIRTYTYADTPDDFQLHNFSLPWEDTKLKIPLIHRALQLSQRPVSLFASPWTSPTWLKTNGAVNGKGSLKGQPGDIYHQTWARYFVKFLDAYAEHKLQFWAVTAENEPSAGLLSGYPFQCLGFTPEHQRDFIARDLGPTLANSTHHNVRLLMLDDQRLLLPHWAKVVLTDPEAAKYVHGIAVHWYLDFLAPAKATLGETHRLFPNTMLFASEACVGSKFWEQSVRLGSWDRGMQYSHSIITNLLYHVVGWTDWNLALNPEGGPNWVRNFVDSPIIVDITKDTFYKQPMFYHLGHFSKFIPEGSQRVGLVASQKNDLDAVALLHPDGSAVVVVLNRSSKDVPLTIKDPAVGFLETISPGYSIHTYLWRRQ

SEQ ID NO: 881 - DNA, 1614 bp, synthetic construct
  misc_feature 1..1614: note = Variant of B-Glucocerebrosidase
  source 1..1614: mol_type = other DNA
atggagttttcttctcctagtagagaagaatgccccaagccactgagcagggtgagcatcatggctggatccctcacagggctgcttcttttgcaggcagtctcatgggcctctggagccaggccctgtattcccaagtcattcggctactcctcagtggtgtgtgtatgcaatgccacctattgtgacagtttcgatcctccaactctccctgctctgggtaccttctcccggtatgagagcacaagaagtggaagacgcatggagctctcaatgggccctatacaggctaaccacactgggacaggtctgctgctgaccctccaacctgaacagaagtttcagaaagtcaagggatttggaggagccatgactgatgcagcagcactcaacatcttggccctgtctccaccagcccagaatctgctgttgaagtcctacttctcagaggaggggattggctacaacatcatccgggttcccatggctagctgtgacttctccattaggacctatacatacgctgacacccccgatgattttcagctccataatttcagtctccctgaagaagacaccaaactgaagatacctctgattcacagagccttgcaactgtcccaaaggccagtgagcctcttcgcttctccctggactagtcctacatggctgaagactaatggtgctgttaatgggaaaggctccctgaaaggacagccaggtgacatatatcatcagacatgggcccgctactttgtgaaattccttgatgcctatgcagagcacaagctccaattctgggcagtcaccgcagaaaacgagccctcagctgggctgctgtctggctacccctttcagtgcttgggctttactcctgagcatcaacgggacttcattgcccgggatttggggccaacactggccaacagcacccaccacggtgtaagactcctcatgctggatgaccagaggctgctgctccctcattgggccaaggtggtgttgacagacccagaagctgccaaatatgttcatggcatcgctgtccactggtacctggattttttggcccctgcaaaggctactctgggagagacccacagactcttccccaataccatgctgtttgcatcagaagcctgcgtggggagcaaattctgggagcagtctgttaggctgggttcctgggatcggggcatgcaatattcccatagtataataactaacctcctctaccacgtggtaggatggacagactggaatctggctttgaacccagaaggaggccccaattgggtgcgcaactttgttgacagccccatcattgtggatatcacaaaggacaccttctacaaacagcctatgttctatcatctggggcactttagcaagttcattccagagggttcccagagagtaggcttggttgcctcacagaagaatgatctggatgctgtggcactcctgcatcctgacgggagtgcagtggtggtagtactgaacaggtctagcaaagatgttcccttgactatcaaagacccagctgtgggctttctggaaaccatttcccctggatactctatccacacctatctctggagaagacagtaatga

SEQ ID NO: 882 - protein, 536 aa, synthetic construct
  REGION 1..536: note = Variant of B-Glucocerebrosidase
MEFSSPSREECPKPLSRVSIMAGSLTGLLLLQAVSWASGARPCIPKSFGYSSVVCVCNATYCDSFDPPTLPALGTFSRYESTRSGRRMELSMGPIQANHTGTGLLLTLQPEQKFQKVKGFGGAMTDAAALNILALSPPAQNLLLKSYFSEEGIGYNIIRVPMASCDFSIRTYTYADTPDDFQLHNFSLPEEDTKLKIPLIHRALQLSQRPVSLFASPWTSPTWLKTNGAVNGKGSLKGQPGDIYHQTWARYFVKFLDAYAEHKLQFWAVTAENEPSAGLLSGYPFQCLGFTPEHQRDFIARDLGPTLANSTHHGVRLLMLDDQRLLLPHWAKVVLTDPEAAKYVHGIAVHWYLDFLAPAKATLGETHRLFPNTMLFASEACVGSKFWEQSVRLGSWDRGMQYSHSIITNLLYHVVGWTDWNLALNPEGGPNWVRNFVDSPIIVDITKDTFYKQPMFYHLGHFSKFIPEGSQRVGLVASQKNDLDAVALLHPDGSAVVVVLNRSSKDVPLTIKDPAVGFLETISPGYSIHTYLWRRQ

SEQ ID NO: 883 - DNA, 1614 bp, synthetic construct
  misc_feature 1..1614: note = Variant of B-Glucocerebrosidase
  source 1..1614: mol_type = other DNA
atggagttttcttctcctagtagagaagaatgccccaagccactgagcagggtgagcatcatggctggatccctcacagggctgcttcttttgcaggcagtctcatgggcctctggagccaggccctgtattcccatgtcattcggctactcctcagtggtgtgtgtatgcaatgccacctattgtgacagtttcgatcctccaactctccctgctctgggtaccttctcccggtatgagagcacaagaagtggaagacgcatggagctctcaatgggccctatacaggctaaccacactgggacaggtctgctgctgaccctccaacctgaacagaagtttcagaaagtcaagggatttggaggagccatgactgatgcagcagcactcaacatcttggccctgtctccaccagcccagaatctgctgttgaagtcctacttctcagaggaggggattggctacaacatcatccgggttcccatggctagctgtgacttctccattaggacctatacatacgctgacacccccgatgattttcagctccataatttcagtctccctgaagaagacaccaaactgaagatacctctgattcacagagccttgcaactgtcccaaaggccagtgagcctcttcgcttctccctggactagtcctacatggctgaagactaatggtgctgttaatgggaaaggctccctgaaaggacagccaggtgacatatatcatcagacatgggcccgctactttgtgaaattccttgatgcctatgcagagcacaagctccaattctgggcagtcaccgcagaaaacgagccctcagctgggctgctgtctggctacccctttcagtgcttgggctttactcctgagcatcaacgggacttcattgcccgggatttggggccaacactggccaacagcacccaccacaatgtaagactcctcatgctggatgaccagaggctgctgctccctcattgggccaaggtggtgttgacagacccagaagctgccaaatatgttcatggcatcgctgtccactggtacctggattttttggcccctgcaaaggctactctgggagagacccacagactcttccccaataccatgctgtttgcatcagaagcctgcgtggggagcaaattctgggagcagtctgttaggctgggttcctgggatcggggcatgcaatattcccatagtataataactaacctcctctaccacgtggtaggatggacagactggaatctggctttgaacccagaaggaggccccaattgggtgcgcaactttgttgacagccccatcattgtggatatcacaaaggacaccttctacaaacagcctatgttctatcatctggggcactttagcaagttcattccagagggttcccagagagtaggcttggttgcctcacagaagaatgatctggatgctgtggcactcctgcatcctgacgggagtgcagtggtggtagtactgaacaggtctagcaaagatgttcccttgactatcaaagacccagctgtgggctttctggaaaccatttcccctggatactctatccacacctatctctggagaagacagtaatga

SEQ ID NO: 884 - protein, 536 aa, synthetic construct
  REGION 1..536: note = Variant of B-Glucocerebrosidase
MEFSSPSREECPKPLSRVSIMAGSLTGLLLLQAVSWASGARPCIPMSFGYSSVVCVCNATYCDSFDPPTLPALGTFSRYESTRSGRRMELSMGPIQANHTGTGLLLTLQPEQKFQKVKGFGGAMTDAAALNILALSPPAQNLLLKSYFSEEGIGYNIIRVPMASCDFSIRTYTYADTPDDFQLHNFSLPEEDTKLKIPLIHRALQLSQRPVSLFASPWTSPTWLKTNGAVNGKGSLKGQPGDIYHQTWARYFVKFLDAYAEHKLQFWAVTAENEPSAGLLSGYPFQCLGFTPEHQRDFIARDLGPTLANSTHHNVRLLMLDDQRLLLPHWAKVVLTDPEAAKYVHGIAVHWYLDFLAPAKATLGETHRLFPNTMLFASEACVGSKFWEQSVRLGSWDRGMQYSHSIITNLLYHVVGWTDWNLALNPEGGPNWVRNFVDSPIIVDITKDTFYKQPMFYHLGHFSKFIPEGSQRVGLVASQKNDLDAVALLHPDGSAVVVVLNRSSKDVPLTIKDPAVGFLETISPGYSIHTYLWRRQ

SEQ ID NO: 885 - DNA, 1614 bp, synthetic construct
  misc_feature 1..1614: note = Variant of B-Glucocerebrosidase
  source 1..1614: mol_type = other DNA
atggagttttcttctcctagtagagaagaatgccccaagccactgagcagggtgagcatcatggctggatccctcacagggctgcttcttttgcaggcagtctcatgggcctctggagccaggccctgtattcccaagtcattcggctactcctcagtggtgtgtgtatgcaatgccacctattgtgacagtttcgatcctccaactctccctgctctgggtaccttctcccggtatgagagcacaagaagtggaagacgcatggagctctcaatgggccctatacaggctaaccacactgggacaggtctgctgctgaccctccaacctgaacagaagtttcagaaagtcaagggatttggaggagccatgactgatgcagcagcactcaacatcttggccctgtctccaccagcccagaatctgctgttgaagtcctacttctcagaggaggggattggctacaacatcatccgggttcccatggctagctgtgacttctccattaggacctatacatacgctgacacccccgatgattttcatctccataatttcagtctccctgaagaagacaccaaactgaagatacctctgattcacagagccttgcaactgtcccaaaggccagtgagcctcttcgcttctccctggactagtcctacatggctgaagactaatggtgctgttaatgggaaaggctccctgaaaggacagccaggtgacatatatcatcagacatgggcccgctactttgtgaaattccttgatgcctatgcagagcacaagctccaattctgggcagtcaccgcagaaaacgagccctcagctgggctgctgtctggctacccctttcagtgcttgggctttactcctgagcatcaacgggacttcattgcccgggatttggggccaacactggccaacagcacccaccacaatgtaagactcctcatgctggatgaccagaggctgctgctccctcattgggccaaggtggtgttgacagacccagaagctgccaaatatgttcatggcatcgctgtccactggtacctggattttttggcccctgcaaaggctactctgggagagacccacagactcttccccaataccatgctgtttgcatcagaagcctgcgtggggagcaaattctgggagcagtctgttaggctgggttcctgggatcggggcatgcaatattcccatagtataataactaacctcctctaccacgtggtaggatggacagactggaatctggctttgaacccagaaggaggccccaattgggtgcgcaactttgttgacagccccatcattgtggatatcacaaaggacaccttctacaaacagcctatgttctatcatctggggcactttagcaagttcattccagagggttcccagagagtaggcttggttgcctcacagaagaatgatctggatgctgtggcactcctgcatcctgacgggagtgcagtggtggtagtactgaacaggtctagcaaagatgttcccttgactatcaaagacccagctgtgggctttctggaaaccatttcccctggatactctatccacacctatctctggagaagacagtaatga

SEQ ID NO: 886 - protein, 536 aa, synthetic construct
  REGION 1..536: note = Variant of B-Glucocerebrosidase
MEFSSPSREECPKPLSRVSIMAGSLTGLLLLQAVSWASGARPCIPKSFGYSSVVCVCNATYCDSFDPPTLPALGTFSRYESTRSGRRMELSMGPIQANHTGTGLLLTLQPEQKFQKVKGFGGAMTDAAALNILALSPPAQNLLLKSYFSEEGIGYNIIRVPMASCDFSIRTYTYADTPDDFHLHNFSLPEEDTKLKIPLIHRALQLSQRPVSLFASPWTSPTWLKTNGAVNGKGSLKGQPGDIYHQTWARYFVKFLDAYAEHKLQFWAVTAENEPSAGLLSGYPFQCLGFTPEHQRDFIARDLGPTLANSTHHNVRLLMLDDQRLLLPHWAKVVLTDPEAAKYVHGIAVHWYLDFLAPAKATLGETHRLFPNTMLFASEACVGSKFWEQSVRLGSWDRGMQYSHSIITNLLYHVVGWTDWNLALNPEGGPNWVRNFVDSPIIVDITKDTFYKQPMFYHLGHFSKFIPEGSQRVGLVASQKNDLDAVALLHPDGSAVVVVLNRSSKDVPLTIKDPAVGFLETISPGYSIHTYLWRRQ

SEQ ID NO: 887 - DNA, 1614 bp, synthetic construct
  misc_feature 1..1614: note = Variant of B-Glucocerebrosidase
  source 1..1614: mol_type = other DNA
atggagttttcttctcctagtagagaagaatgccccaagccactgagcagggtgagcatcatggctggatccctcacagggctgcttcttttgcaggcagtctcatgggcctctggagccaggccctgtattcccaagtcattcggctactcctcagtggtgtgtgtatgcaatgccacctattgtgacagtttcgatcctccaactctccctgctctgggtaccttctcccggtatgagagcacaagaagtggaagacgcatggagctctcaatgggccctatacaggctaaccacactgggacaggtctgctgctgaccctccaacctgaacagaagtttcagaaagtcaagggatttggaggagccatgactgatgcagcagcactcaacatcttggccctgtctccaccagcccagaatctgctgttgaagtcctacttctcagaggaggggattggctacaacatcatccgggttcccatggctagctgtgacttctccattaggacctatacatacgctgacacccccgatgattttcagctccataatttcagtctccctgaagaagacaccaaactgaagatacctctgattcacagagccttgcaactgtcccaaaggccagtgagcctcttcgcttctccctggactagtcctacatggctgaagactaatggtgctgttaatgggaaaggctccctgaaaggacagccaggtgacatctatcataagacatgggcccgctactttgtgaaattccttgatgcctatgcagagcacaagctccaattctgggcagtcaccgcagaaaacgagccctcagctgggctgctgtctggctacccctttcagtgcttgggctttactcctgagcatcaacgggacttcattgcccgggatttggggccaacactggccaacagcacccaccacaatgtaagactcctcatgctggatgaccagaggctgctgctccctcattgggccaaggtggtgttgacagacccagaagctgccaaatatgttcatggcatcgctgtccactggtacctggattttttggcccctgcaaaggctactctgggagagacccacagactcttccccaataccatgctgtttgcatcagaagcctgcgtggggagcaaattctgggagcagtctgttaggctgggttcctgggatcggggcatgcaatattcccatagtataataactaacctcctctaccacgtggtaggatggacagactggaatctggctttgaacccagaaggaggccccaattgggtgcgcaactttgttgacagccccatcattgtggatatcacaaaggacaccttctacaaacagcctatgttctatcatctggggcactttagcaagttcattccagagggttcccagagagtaggcttggttgcctcacagaagaatgatctggatgctgtggcactcctgcatcctgacgggagtgcagtggtggtagtactgaacaggtctagcaaagatgttcccttgactatcaaagacccagctgtgggctttctggaaaccatttcccctggatactctatccacacctatctctggagaagacagtaatga

SEQ ID NO: 888 - protein, 536 aa, synthetic construct
  REGION 1..536: note = Variant of B-Glucocerebrosidase
MEFSSPSREECPKPLSRVSIMAGSLTGLLLLQAVSWASGARPCIPKSFGYSSVVCVCNATYCDSFDPPTLPALGTFSRYESTRSGRRMELSMGPIQANHTGTGLLLTLQPEQKFQKVKGFGGAMTDAAALNILALSPPAQNLLLKSYFSEEGIGYNIIRVPMASCDFSIRTYTYADTPDDFQLHNFSLPEEDTKLKIPLIHRALQLSQRPVSLFASPWTSPTWLKTNGAVNGKGSLKGQPGDIYHKTWARYFVKFLDAYAEHKLQFWAVTAENEPSAGLLSGYPFQCLGFTPEHQRDFIARDLGPTLANSTHHNVRLLMLDDQRLLLPHWAKVVLTDPEAAKYVHGIAVHWYLDFLAPAKATLGETHRLFPNTMLFASEACVGSKFWEQSVRLGSWDRGMQYSHSIITNLLYHVVGWTDWNLALNPEGGPNWVRNFVDSPIIVDITKDTFYKQPMFYHLGHFSKFIPEGSQRVGLVASQKNDLDAVALLHPDGSAVVVVLNRSSKDVPLTIKDPAVGFLETISPGYSIHTYLWRRQ

SEQ ID NO: 889 - DNA, 1614 bp, synthetic construct
  misc_feature 1..1614: note = Variant of B-Glucocerebrosidase
  source 1..1614: mol_type = other DNA
atggagttttcttctcctagtagagaagaatgccccaagccactgagcagggtgagcatcatggctggatccctcacagggctgcttcttttgcaggcagtctcatgggcctctggagccaggccctgtattcccaagtcattcggctactcctcagtggtgtgtgtatgcaatgccacctattgtgacagtttcgatcctccaactctccctgctctgggtaccttctcccggtatgagagcacaagaagtggaagacgcatggagctctcaatgggccctatacaggctaaccacactgggacaggtctgactctgaccctccaacctgaacagaagtttcagaaagtcaagggatttggaggagccatgactgatgcagcagcactcaacatcttggccctgtctccaccagcccagaatctgctgttgaagtcctacttctcagaggaggggattggctacaacatcatccgggttcccatggctagctgtgacttctccattaggacctatacatacgctgacacccccgatgattttcagctccataatttcagtctccctgaagaagacaccaaactgaagatacctctgattcacagagccttgcaactgtcccaaaggccagtgagcctcttcgcttctccctggactagtcctacatggctgaagactaatggtgctgttaatgggaaaggctccctgaaaggacagccaggtgacatatatcatcagacatgggcccgctactttgtgaaattccttgatgcctatgcagagcacaagctccaattctgggcagtcaccgcagaaaacgagccctcagctgggctgctgtctggctacccctttcagtgcttgggctttactcctgagcatcaacgggacttcattgcccgggatttggggccaacactggccaacagcacccaccacaatgtaagactcctcatgctggatgaccagaggctgctgctccctcattgggccaaggtggtgttgacagacccagaagctgccaaatatgttcatggcatcgctgtccactggtacctggattttttggcccctgcaaaggctactctgggagagacccacagactcttccccaataccatgctgtttgcatcagaagcctgcgtggggagcaaattctgggagcagtctgttaggctgggttcctgggatcggggcatgcaatattcccatagtataataactaacctcctctaccacgtggtaggatggacagactggaatctggctttgaacccagaaggaggccccaattgggtgcgcaactttgttgacagccccatcattgtggatatcacaaaggacaccttctacaaacagcctatgttctatcatctggggcactttagcaagttcattccagagggttcccagagagtaggcttggttgcctcacagaagaatgatctggatgctgtggcactcctgcatcctgacgggagtgcagtggtggtagtactgaacaggtctagcaaagatgttcccttgactatcaaagacccagctgtgggctttctggaaaccatttcccctggatactctatccacacctatctctggagaagacagtaatga

SEQ ID NO: 890 - protein, 536 aa, synthetic construct
  REGION 1..536: note = Variant of B-Glucocerebrosidase
MEFSSPSREECPKPLSRVSIMAGSLTGLLLLQAVSWASGARPCIPKSFGYSSVVCVCNATYCDSFDPPTLPALGTFSRYESTRSGRRMELSMGPIQANHTGTGLTLTLQPEQKFQKVKGFGGAMTDAAALNILALSPPAQNLLLKSYFSEEGIGYNIIRVPMASCDFSIRTYTYADTPDDFQLHNFSLPEEDTKLKIPLIHRALQLSQRPVSLFASPWTSPTWLKTNGAVNGKGSLKGQPGDIYHQTWARYFVKFLDAYAEHKLQFWAVTAENEPSAGLLSGYPFQCLGFTPEHQRDFIARDLGPTLANSTHHNVRLLMLDDQRLLLPHWAKVVLTDPEAAKYVHGIAVHWYLDFLAPAKATLGETHRLFPNTMLFASEACVGSKFWEQSVRLGSWDRGMQYSHSIITNLLYHVVGWTDWNLALNPEGGPNWVRNFVDSPIIVDITKDTFYKQPMFYHLGHFSKFIPEGSQRVGLVASQKNDLDAVALLHPDGSAVVVVLNRSSKDVPLTIKDPAVGFLETISPGYSIHTYLWRRQ

SEQ ID NO: 891 - DNA, 1614 bp, synthetic construct
  misc_feature 1..1614: note = Variant of B-Glucocerebrosidase
  source 1..1614: mol_type = other DNA
atggagttttcttctcctagtagagaagaatgccccaagccactgagcagggtgagcatcatggctggatccctcacagggctgcttcttttgcaggcagtctcatgggcctctggagccaggccctgtattcccaagtcattcggctactcctcagtggtgtgtgtatgcaatgccacctattgtgacagtttcgatcctccaactctccctgctctgggtaccttctcccggtatgagagcacaagaagtggaagacgcatggagctctcaatgggccctatacaggctaaccacactgggacaggtctgctgctgaccctccaacctgaacagaagtttcagaaagtcaagggatttggaggagccatgactgatgcagcagcactcaacatcttggccctgtctccaccagcccagaatctgctgttgaagtcctacttctcagaggaggggattggctacaacatcatccgggttcccatggctagctgtgacttctccattaggacctatacatacgctgacacccccgatgattttcagctccataatttcagtctccctgaagaagacaccaaactgaagatacctctgattcacagagccttgcaactgtcccaaaggccagtgagcctcttcgcttctccctggactagtcctacatggctgaagactaatggtgctgttaatgggaaaggctccctgaaaggacagccaggtgacatatatcatcagacatgggcccgctactttgtgaaattccttgatgcctatgcagagcacaagctccaattctgggcagtcaccgcagaaaacgagccctcagctgggctgctgtctggctacccctttcagtgcttgggctttactcctgagcatcaacgggacttcattgccaaggatttggggccaacactggccaacagcacccaccacaatgtaagactcctcatgctggatgaccagaggctgctgctccctcattgggccaaggtggtgttgacagacccagaagctgccaaatatgttcatggcatcgctgtccactggtacctggattttttggcccctgcaaaggctactctgggagagacccacagactcttccccaataccatgctgtttgcatcagaagcctgcgtggggagcaaattctgggagcagtctgttaggctgggttcctgggatcggggcatgcaatattcccatagtataataactaacctcctctaccacgtggtaggatggacagactggaatctggctttgaacccagaaggaggccccaattgggtgcgcaactttgttgacagccccatcattgtggatatcacaaaggacaccttctacaaacagcctatgttctatcatctggggcactttagcaagttcattccagagggttcccagagagtaggcttggttgcctcacagaagaatgatctggatgctgtggcactcctgcatcctgacgggagtgcagtggtggtagtactgaacaggtctagcaaagatgttcccttgactatcaaagacccagctgtgggctttctggaaaccatttcccctggatactctatccacacctatctctggagaagacagtaatga

SEQ ID NO: 892 - protein, 536 aa, synthetic construct
  REGION 1..536: note = Variant of B-Glucocerebrosidase
MEFSSPSREECPKPLSRVSIMAGSLTGLLLLQAVSWASGARPCIPKSFGYSSVVCVCNATYCDSFDPPTLPALGTFSRYESTRSGRRMELSMGPIQANHTGTGLLLTLQPEQKFQKVKGFGGAMTDAAALNILALSPPAQNLLLKSYFSEEGIGYNIIRVPMASCDFSIRTYTYADTPDDFQLHNFSLPEEDTKLKIPLIHRALQLSQRPVSLFASPWTSPTWLKTNGAVNGKGSLKGQPGDIYHQTWARYFVKFLDAYAEHKLQFWAVTAENEPSAGLLSGYPFQCLGFTPEHQRDFIAKDLGPTLANSTHHNVRLLMLDDQRLLLPHWAKVVLTDPEAAKYVHGIAVHWYLDFLAPAKATLGETHRLFPNTMLFASEACVGSKFWEQSVRLGSWDRGMQYSHSIITNLLYHVVGWTDWNLALNPEGGPNWVRNFVDSPIIVDITKDTFYKQPMFYHLGHFSKFIPEGSQRVGLVASQKNDLDAVALLHPDGSAVVVVLNRSSKDVPLTIKDPAVGFLETISPGYSIHTYLWRRQ

SEQ ID NO: 893 - DNA, 1614 bp, synthetic construct
  misc_feature 1..1614: note = Variant of B-Glucocerebrosidase
  source 1..1614: mol_type = other DNA
atggagttttcttctcctagtagagaagaatgccccaagccactgagcagggtgagcatcatggctggatccctcacagggctgcttcttttgcaggcagtctcatgggcctctggagccaggccctgtattcccaagtcattcggctactcctcagtggtgtgtgtatgcaatgccacctattgtgacagtttcgatcctccaactctccctgctctgggtaccttctcccggtatgagagcacaagaagtggaagacgcatggagctctcaatgggccctatacaggctaaccacactgggacaggtctgctgctgaccctccaacctgaacagaagtttcagaaagtcaagggatttggaggagccatgactgatgcagcagcactcaacatcttggccctgtctccaccagcccagaatctgctgttgaagtcctacttctcagaggaggggattggctacaacatcatccgggttcccatggctagctgtgacttctccattaggacctatacatacgctgacacccccgatgattttcagctccataatttcagtctccctgaagaagacaccaaactgaagatacctctgattcacagagccttgcaactgtcccaaaggccagtgagcctcttcgcttctccctggactagtcctacatggctgaagactaatggtgctgttaatgggaaaggctccctgaaaggacagccaggtgacatatatcatcagacatgggcccgctactttgtgaaattccttgatgcctatgcagagcacaagctccaattctgggcagtcaccgcagaaaacgagccctcagctgggctgctgtctggctacccctttcagtgcttgggctttactcctgagcatcaacgggacttcattgcccgggatttggggccaacactggccaacagcacccaccacaatgtaagactcctcatgctggatgaccagaggctgctgctccctcattgggccaaggtggtgttgacagacccagaagctgccaaatatgttcatggcatcgctgtccactggtacctggattttttggcccctgcaaaggctactctgggagagacccacagactcttccccaataccatgctgtttgcatcagaagcctgcgtggggagcaaattctgggagcagtctgttaggctgggttcctgggatcggggcatgcaatattcccatagtataataactaacctcctctaccacgtggtaggatggacagactggaatctggctttgaacccagaaggaggccccaattgggtgcgcaactttgttgacagccccatcattgtggatatcacaaaggacaccttctacaaacagcctatgttctatcatctggggcactttagcaagttcattccagagggttcccagagagtaggcttggttgcctcacagaagaatgatctggatgctgtggcactcctgcatcctgacgggagtgcagtggtggtagtactgaacaggtctagcaaagatgttcccttgactatcaaagacccagctgtgggctttctggaaaccacttcccctggatactctatccacacctatctctggagaagacagtaatga

SEQ ID NO: 894 - protein, 536 aa, synthetic construct
  REGION 1..536: note = Variant of B-Glucocerebrosidase
MEFSSPSREECPKPLSRVSIMAGSLTGLLLLQAVSWASGARPCIPKSFGYSSVVCVCNATYCDSFDPPTLPALGTFSRYESTRSGRRMELSMGPIQANHTGTGLLLTLQPEQKFQKVKGFGGAMTDAAALNILALSPPAQNLLLKSYFSEEGIGYNIIRVPMASCDFSIRTYTYADTPDDFQLHNFSLPEEDTKLKIPLIHRALQLSQRPVSLFASPWTSPTWLKTNGAVNGKGSLKGQPGDIYHQTWARYFVKFLDAYAEHKLQFWAVTAENEPSAGLLSGYPFQCLGFTPEHQRDFIARDLGPTLANSTHHNVRLLMLDDQRLLLPHWAKVVLTDPEAAKYVHGIAVHWYLDFLAPAKATLGETHRLFPNTMLFASEACVGSKFWEQSVRLGSWDRGMQYSHSIITNLLYHVVGWTDWNLALNPEGGPNWVRNFVDSPIIVDITKDTFYKQPMFYHLGHFSKFIPEGSQRVGLVASQKNDLDAVALLHPDGSAVVVVLNRSSKDVPLTIKDPAVGFLETTSPGYSIHTYLWRRQ

SEQ ID NO: 895 - DNA, 1614 bp, synthetic construct
  misc_feature 1..1614: note = Variant of B-Glucocerebrosidase
  source 1..1614: mol_type = other DNA
atggagttttcttctcctagtagagaagaatgccccaagccactgagcagggtgagcatcatggctggatccctcacagggctgcttcttttgcaggcagtctcatgggcctctggagccaggccctgtattcccaagtcattcggctactcctcagtggtgtgtgtatgcaatgccacctattgtgacagtttcgatcctccaactctccctgctctgggtaccttctcccggtatgagagcacaagaagtggaagacgcatggagctctcaatgggccctatacaggctaaccacactgggacaggtctgctgctgaccctccaacctgaacagaagtttcagaaagtcaagggatttggaggagccatgactgatgcagcagcactcaacatcttggccctgtctccaccagcccagaatctgctgttgaagtcctacttctcagaggaggggattggctacaacatcatccgggttcccatggctagctgtgacttctccattaggacctatacatacgctgacacccccgatgattttcagctccataatttcagtctccctgaagaagacaccaaactgaagatacctctgattcacagagccttgcaactgtcccaaaggccagtgagcctcttcgcttctccctggactagtcctacatggctgaagactaatggtgctgttaatgggaaaggctccctgaaaggacagccaggtgacatatatcatcagacatgggcccgctactttgtgaaattccttgatgcctatgcagagcacaagctccaattctgggcagtcaccgcagaaaacgagccctcagctgggctgctgtctggctacccctttcagtgcttgggctttactcctgagcatcaacgggacttcattgcccgggatttggggccaacactggccaacagcacccaccacaatgtaagactcctcatgctggatgaccagaggctgctgctccctctttgggccaaggtggtgttgacagacccagaagctgccaaatatgttcatggcatcgctgtccactggtacctggattttttggcccctgcaaaggctactctgggagagacccacagactcttccccaataccatgctgtttgcatcagaagcctgcgtggggagcaaattctgggagcagtctgttaggctgggttcctgggatcggggcatgcaatattcccatagtataataactaacctcctctaccacgtggtaggatggacagactggaatctggctttgaacccagaaggaggccccaattgggtgcgcaactttgttgacagccccatcattgtggatatcacaaaggacaccttctacaaacagcctatgttctatcatctggggcactttagcaagttcattccagagggttcccagagagtaggcttggttgcctcacagaagaatgatctggatgctgtggcactcctgcatcctgacgggagtgcagtggtggtagtactgaacaggtctagcaaagatgttcccttgactatcaaagacccagctgtgggctttctggaaaccatttcccctggatactctatccacacctatctctggagaagacagtaatga

SEQ ID NO: 896 - protein, 536 aa, synthetic construct
  REGION 1..536: note = Variant of B-Glucocerebrosidase
MEFSSPSREECPKPLSRVSIMAGSLTGLLLLQAVSWASGARPCIPKSFGYSSVVCVCNATYCDSFDPPTLPALGTFSRYESTRSGRRMELSMGPIQANHTGTGLLLTLQPEQKFQKVKGFGGAMTDAAALNILALSPPAQNLLLKSYFSEEGIGYNIIRVPMASCDFSIRTYTYADTPDDFQLHNFSLPEEDTKLKIPLIHRALQLSQRPVSLFASPWTSPTWLKTNGAVNGKGSLKGQPGDIYHQTWARYFVKFLDAYAEHKLQFWAVTAENEPSAGLLSGYPFQCLGFTPEHQRDFIARDLGPTLANSTHHNVRLLMLDDQRLLLPLWAKVVLTDPEAAKYVHGIAVHWYLDFLAPAKATLGETHRLFPNTMLFASEACVGSKFWEQSVRLGSWDRGMQYSHSIITNLLYHVVGWTDWNLALNPEGGPNWVRNFVDSPIIVDITKDTFYKQPMFYHLGHFSKFIPEGSQRVGLVASQKNDLDAVALLHPDGSAVVVVLNRSSKDVPLTIKDPAVGFLETISPGYSIHTYLWRRQ

SEQ ID NO: 897 - DNA, 1614 bp, synthetic construct
  misc_feature 1..1614: note = Variant of B-Glucocerebrosidase
  source 1..1614: mol_type = other DNA
atggagttttcttctcctagtagagaagaatgccccaagccactgagcagggtgagcatcatggctggatccctcacagggctgcttcttttgcaggcagtctcatgggcctctggagccaggccctgtattcccaagtcattcggctactcctcagtggtgtgtgtatgcaatgccacctattgtgacagtttcgatcctccaactctccctgctctgggtaccttctcccggtatgagagcacaagaagtggaagacgcatggagctctcaatgggcccaatagtggctaaccacactgggacaggtctgctgctgaccctccaacctgaacagaagtttcagaaagtcaagggatttggaggagccatgactgatgcagcagcactcaacatcttggccctgtctccaccagcccagaatctgctgttgaagtcctacttctcagaggaggggattggctacaacatcatccgggttcccatggctagctgtgacttctccattaggacctatacatacgctgacacccccgatgattttcagctccataatttcagtctccctgaagaagacaccaaactgaagatacctctgattcacagagccttgcaactgtcccaaaggccagtgagcctcttcgcttctccctggactagtcctacatggctgaagactaatggtgctgttaatgggaaaggctccctgaaaggacagccaggtgacatatatcatcagacatgggcccgctactttgtgaaattccttgatgcctatgcagagcacaagctccaattctgggcagtcaccgcagaaaacgagccctcagctgggctgctgtctggctacccctttcagtgcttgggctttactcctgagcatcaacgggacttcattgcccgggatttggggccaacactggccaacagcacccaccacaatgtaagactcctcatgctggatgaccagaggctgctgctccctcattgggccaaggtggtgttgacagacccagaagctgccaaatatgttcatggcatcgctgtccactggtacctggattttttggcccctgcaaaggctactctgggagagacccacagactcttccccaataccatgctgtttgcatcagaagcctgcgtggggagcaaattctgggagcagtctgttaggctgggttcctgggatcggggcatgcaatattcccatagtataataactaacctcctctaccacgtggtaggatggacagactggaatctggctttgaacccagaaggaggccccaattgggtgcgcaactttgttgacagccccatcattgtggatatcacaaaggacaccttctacaaacagcctatgttctatcatctggggcactttagcaagttcattccagagggttcccagagagtaggcttggttgcctcacagaagaatgatctggatgctgtggcactcctgcatcctgacgggagtgcagtggtggtagtactgaacaggtctagcaaagatgttcccttgactatcaaagacccagctgtgggctttctggaaaccatttcccctggatactctatccacacctatctctggagaagacagtaatga

SEQ ID NO: 898 - protein, 536 aa, synthetic construct
  REGION 1..536: note = Variant of B-Glucocerebrosidase
MEFSSPSREECPKPLSRVSIMAGSLTGLLLLQAVSWASGARPCIPKSFGYSSVVCVCNATYCDSFDPPTLPALGTFSRYESTRSGRRMELSMGPIVANHTGTGLLLTLQPEQKFQKVKGFGGAMTDAAALNILALSPPAQNLLLKSYFSEEGIGYNIIRVPMASCDFSIRTYTYADTPDDFQLHNFSLPEEDTKLKIPLIHRALQLSQRPVSLFASPWTSPTWLKTNGAVNGKGSLKGQPGDIYHQTWARYFVKFLDAYAEHKLQFWAVTAENEPSAGLLSGYPFQCLGFTPEHQRDFIARDLGPTLANSTHHNVRLLMLDDQRLLLPHWAKVVLTDPEAAKYVHGIAVHWYLDFLAPAKATLGETHRLFPNTMLFASEACVGSKFWEQSVRLGSWDRGMQYSHSIITNLLYHVVGWTDWNLALNPEGGPNWVRNFVDSPIIVDITKDTFYKQPMFYHLGHFSKFIPEGSQRVGLVASQKNDLDAVALLHPDGSAVVVVLNRSSKDVPLTIKDPAVGFLETISPGYSIHTYLWRRQ

SEQ ID NO: 899 - DNA, 1614 bp, synthetic construct
  misc_feature 1..1614: note = Variant of B-Glucocerebrosidase
  source 1..1614: mol_type = other DNA
atggagttttcttctcctagtagagaagaatgccccaagccactgagcagggtgagcatcatggctggatccctcacagggctgcttcttttgcaggcagtctcatgggcctctggagccaggccctgtattcccaagtcattcggctactcctcagtggtgtgtgtatgcaatgccacctattgtgacagtttcgatcctccaactctccctgctctgggtaccttctcccggtatgagagcacaagaagtggaagacgcatggagctctcaatgggccctatacaggctaaccacactgggacaggtctgctgctgaccctccaacctgaacagaagtttcagaaagtcaagggatttggaggagccatgactgatgcagcagcactcaacatcttggccctgtctccaccagcccagaatctgctgttgaagtcctacttctcagaggaggggattggctacaacatcatccgggttcccatggctagctgtgacttctccattaggacctatacatacgctgacacccccgatgattttcagctccataatttcagtctccctgaagaagacaccaaactgaagatacctctgattcacagagccttgcaactgtcccaaaggccagtgagcctcttcgcttctccctggactagtcctacatggctgaagactaatggtgctgttaatgggaaaggctccctgaaaggacagccaggtgacatatatcatcagacatgggcccgctactttgtgaaattccttgatgcctatgcagagcacaagctccaattctgggcagtcaccgcagaaaacgagccctcagctgggctgctgtctggctacccctttcagtgcttgggctttactcctgagcatcaacgggacttcattgcccgggatttggggccaacactggccaacagcacccaccacaatgtaagactcctcatgctggatgaccagaggctgctgctccctcattgggccaaggtggtgttgacagacccagcggctgccaaatatgttcatggcatcgctgtccactggtacctggattttttggcccctgcaaaggctactctgggagagacccacagactcttccccaataccatgctgtttgcatcagaagcctgcgtggggagcaaattctgggagcagtctgttaggctgggttcctgggatcggggcatgcaatattcccatagtataataactaacctcctctaccacgtggtaggatggacagactggaatctggctttgaacccagaaggaggccccaattgggtgcgcaactttgttgacagccccatcattgtggatatcacaaaggacaccttctacaaacagcctatgttctatcatctggggcactttagcaagttcattccagagggttcccagagagtaggcttggttgcctcacagaagaatgatctggatgctgtggcactcctgcatcctgacgggagtgcagtggtggtagtactgaacaggtctagcaaagatgttcccttgactatcaaagacccagctgtgggctttctggaaaccatttcccctggatactctatccacacctatctctggagaagacagtaatga

SEQ ID NO: 900 - protein, 536 aa, synthetic construct
  REGION 1..536: note = Variant of B-Glucocerebrosidase
MEFSSPSREECPKPLSRVSIMAGSLTGLLLLQAVSWASGARPCIPKSFGYSSVVCVCNATYCDSFDPPTLPALGTFSRYESTRSGRRMELSMGPIQANHTGTGLLLTLQPEQKFQKVKGFGGAMTDAAALNILALSPPAQNLLLKSYFSEEGIGYNIIRVPMASCDFSIRTYTYADTPDDFQLHNFSLPEEDTKLKIPLIHRALQLSQRPVSLFASPWTSPTWLKTNGAVNGKGSLKGQPGDIYHQTWARYFVKFLDAYAEHKLQFWAVTAENEPSAGLLSGYPFQCLGFTPEHQRDFIARDLGPTLANSTHHNVRLLMLDDQRLLLPHWAKVVLTDPAAAKYVHGIAVHWYLDFLAPAKATLGETHRLFPNTMLFASEACVGSKFWEQSVRLGSWDRGMQYSHSIITNLLYHVVGWTDWNLALNPEGGPNWVRNFVDSPIIVDITKDTFYKQPMFYHLGHFSKFIPEGSQRVGLVASQKNDLDAVALLHPDGSAVVVVLNRSSKDVPLTIKDPAVGFLETISPGYSIHTYLWRRQ

SEQ ID NO: 901 - DNA, 1614 bp, synthetic construct
  misc_feature 1..1614: note = Variant of B-Glucocerebrosidase
  source 1..1614: mol_type = other DNA
atggagttttcttctcctagtagagaagaatgccccaagccactgagcagggtgagcatcatggctggatccctcacagggctgcttcttttgcaggcagtctcatgggcctctggagccaggccctgtattcccaagtcattcggctactcctcagtggtgtgtgtatgcaatgccacctattgtgacagtttcgatcctccaactctccctgctctgggtaccttctcccggtatgagagcacaagaagtggaagacgcatggagctctcaatgggccctatacaggctaaccacactgggacaggtctgctgctgaccctccaacctgaacagaagtttcagaaagtcaagggatttggaggagccatgactgatgcagcagcactcaacatcttggccctgtctccaccagcccagaatctgctgttgaagtcctacttctcagaggaggggattggctacaacatcatccgggttcccatggctagctgtgacttctccattaggacctatacatacgctgacacccccgatgattttcagctccataatttcagtctccctgaagaagacaccaaactgaagatacctctgattcacagagccttgcaactgtcccaaaggccagtgagcctcttcgcttctccctggactagtcctacatggctgaagactaatggtgctgttaatgggaaaggctccctgaaaggacagccaggtgacatatatcatcagacatgggcccgctactttgtgaaattccttgatgcctatgcagagcacaagctccaattctgggcagtcaccgcagaaaacgagccctcagctgggctgctgtctggctacccctttcagtgcttgggctttactcctgagcatcaacgggacttcattgcccgggatttggggccaacactggccaacagcacccaccacaatgtaagactcctcatgctggatgaccagaggctgctgctccctcattgggccaaggtggtgttgacagacccagaagctgccaaatatgttcatggcatcgctgtccactggtacctggattttttggcccctgcaaaggctactctgggagagacccacagactcttccccaataccatgctgtttgcatcagaagcctgcgtggggagcaaattctgggagcagtctgttaggctgggttcctgggatcggggcatgcaatattcccatagtataataactaacctcctctaccacgtggtaggatggacagactggaatctggctttgaacccagaaggaggccccaattgggtgcgcaactttgttgacagccccatcattgtggatatcacaaaggacaccttctacaaacagcctatgttctatcatctggggcactttagcaagttcattccagagggttcccagagagtaggcttggtttcttcacagaagaatgatctggatgctgtggcactcctgcatcctgacgggagtgcagtggtggtagtactgaacaggtctagcaaagatgttcccttgactatcaaagacccagctgtgggctttctggaaaccatttcccctggatactctatccacacctatctctggagaagacagtaatga

SEQ ID NO: 902 - protein, 536 aa, synthetic construct
  REGION 1..536: note = Variant of B-Glucocerebrosidase
MEFSSPSREECPKPLSRVSIMAGSLTGLLLLQAVSWASGARPCIPKSFGYSSVVCVCNATYCDSFDPPTLPALGTFSRYESTRSGRRMELSMGPIQANHTGTGLLLTLQPEQKFQKVKGFGGAMTDAAALNILALSPPAQNLLLKSYFSEEGIGYNIIRVPMASCDFSIRTYTYADTPDDFQLHNFSLPEEDTKLKIPLIHRALQLSQRPVSLFASPWTSPTWLKTNGAVNGKGSLKGQPGDIYHQTWARYFVKFLDAYAEHKLQFWAVTAENEPSAGLLSGYPFQCLGFTPEHQRDFIARDLGPTLANSTHHNVRLLMLDDQRLLLPHWAKVVLTDPEAAKYVHGIAVHWYLDFLAPAKATLGETHRLFPNTMLFASEACVGSKFWEQSVRLGSWDRGMQYSHSIITNLLYHVVGWTDWNLALNPEGGPNWVRNFVDSPIIVDITKDTFYKQPMFYHLGHFSKFIPEGSQRVGLVSSQKNDLDAVALLHPDGSAVVVVLNRSSKDVPLTIKDPAVGFLETISPGYSIHTYLWRRQ

SEQ ID NO: 903 - DNA, 1614 bp, synthetic construct
  misc_feature 1..1614: note = Variant of B-Glucocerebrosidase
  source 1..1614: mol_type = other DNA
atggagttttcttctcctagtagagaagaatgccccaagccactgagcagggtgagcatcatggctggatccctcacagggctgcttcttttgcaggcagtctcatgggcctctggagccaggccctgtattcccaagtcattcggctactcctcagtggtgtgtgtatgcaatgccacctattgtgacagtttcgatcctccaactctccctgctctgggtaccttctcccggtatgagagcacaagaagtggaagacgcatggagctctcaatgggccctatacaggctaaccacactgggacaggtctgctgctgaccctccaacctgaacagggttttcagaaagtcaagggatttggaggagccatgactgatgcagcagcactcaacatcttggccctgtctccaccagcccagaatctgctgttgaagtcctacttctcagaggaggggattggctacaacatcatccgggttcccatggctagctgtgacttctccattaggacctatacatacgctgacacccccgatgattttcagctccataatttcagtctccctgaagaagacaccaaactgaagatacctctgattcacagagccttgcaactgtcccaaaggccagtgagcctcttcgcttctccctggactagtcctacatggctgaagactaatggtgctgttaatgggaaaggctccctgaaaggacagccaggtgacatatatcatcagacatgggcccgctactttgtgaaattccttgatgcctatgcagagcacaagctccaattctgggcagtcaccgcagaaaacgagccctcagctgggctgctgtctggctacccctttcagtgcttgggctttactcctgagcatcaacgggacttcattgcccgggatttggggccaacactggccaacagcacccaccacaatgtaagactcctcatgctggatgaccagaggctgctgctccctcattgggccaaggtggtgttgacagacccagaagctgccaaatatgttcatggcatcgctgtccactggtacctggattttttggcccctgcaaaggctactctgggagagacccacagactcttccccaataccatgctgtttgcatcagaagcctgcgtggggagcaaattctgggagcagtctgttaggctgggttcctgggatcggggcatgcaatattcccatagtataataactaacctcctctaccacgtggtaggatggacagactggaatctggctttgaacccagaaggaggccccaattgggtgcgcaactttgttgacagccccatcattgtggatatcacaaaggacaccttctacaaacagcctatgttctatcatctggggcactttagcaagttcattccagagggttcccagagagtaggcttggttgcctcacagaagaatgatctggatgctgtggcactcctgcatcctgacgggagtgcagtggtggtagtactgaacaggtctagcaaagatgttcccttgactatcaaagacccagctgtgggctttctggaaaccatttcccctggatactctatccacacctatctctggagaagacagtaatga

SEQ ID NO: 904 - protein, 536 aa, synthetic construct
  REGION 1..536: note = Variant of B-Glucocerebrosidase
MEFSSPSREECPKPLSRVSIMAGSLTGLLLLQAVSWASGARPCIPKSFGYSSVVCVCNATYCDSFDPPTLPALGTFSRYESTRSGRRMELSMGPIQANHTGTGLLLTLQPEQGFQKVKGFGGAMTDAAALNILALSPPAQNLLLKSYFSEEGIGYNIIRVPMASCDFSIRTYTYADTPDDFQLHNFSLPEEDTKLKIPLIHRALQLSQRPVSLFASPWTSPTWLKTNGAVNGKGSLKGQPGDIYHQTWARYFVKFLDAYAEHKLQFWAVTAENEPSAGLLSGYPFQCLGFTPEHQRDFIARDLGPTLANSTHHNVRLLMLDDQRLLLPHWAKVVLTDPEAAKYVHGIAVHWYLDFLAPAKATLGETHRLFPNTMLFASEACVGSKFWEQSVRLGSWDRGMQYSHSIITNLLYHVVGWTDWNLALNPEGGPNWVRNFVDSPIIVDITKDTFYKQPMFYHLGHFSKFIPEGSQRVGLVASQKNDLDAVALLHPDGSAVVVVLNRSSKDVPLTIKDPAVGFLETISPGYSIHTYLWRRQ

SEQ ID NO: 905 - DNA, 1614 bp, synthetic construct
  misc_feature 1..1614: note = Variant of B-Glucocerebrosidase
  source 1..1614: mol_type = other DNA
atggagttttcttctcctagtagagaagaatgccccaagccactgagcagggtgagcatcatggctggatccctcacagggctgcttcttttgcaggcagtctcatgggcctctggagccaggccctgtattcccaagtcattcggctactcctcagtggtgtgtgtatgcaatgccacctattgtgacagtttcgatcctccaactctccctgctctgggtaccttctcccggtatgagagcacaagaagtggaagacgcatggagctctcaatgggccctatacaggctaaccacactgggacaggtctgctgctgaccctccaacctgaacagaagtttcagaaagtcaagggatttggaggagccatgactgatgcagcagcactcaacatcttggccctgtctccaccagcccagaatctgctgttgaagtcctacttctcagaggaggggattggctacaacatcatccgggttcccatggctagctgtgacttctccattaggacctatacatacgctgacacccccgatgattttcagctccataatttcagtctccctgaagaagacaccaaactgaagatacctctgattcacagagccttgcaactgtcccaaaggccagtgagcctcttcgcttctccctggactagtcctacatggctgaagactaatggtgctgttaatgggaaaggctccctgaaaggacagccaggtgacatatatcatcagacatgggcccgctactttgtgaaattccttgatgcctatgcagagcacaagctccaattctgggcagtcaccgcagaaaacgagccctcagctgggctgctgtctggctacccctttcagtgcttgggctttactcctgagcatcaacgggacttcattgcccgggatttggggccaacactggccaacagcacccaccacaatgtaagactcctcatgctggatgaccagaggctgctgctccctcattgggccaaggtggtgttgacagacccagaagctgccaaatatgttcatggcatcgctgtccactggtacctggattttttggcccctgcaaagttgactctgggagagacccacagactcttccccaataccatgctgtttgcatcagaagcctgcgtggggagcaaattctgggagcagtctgttaggctgggttcctgggatcggggcatgcaatattcccatagtataataactaacctcctctaccacgtggtaggatggacagactggaatctggctttgaacccagaaggaggccccaattgggtgcgcaactttgttgacagccccatcattgtggatatcacaaaggacaccttctacaaacagcctatgttctatcatctggggcactttagcaagttcattccagagggttcccagagagtaggcttggttgcctcacagaagaatgatctggatgctgtggcactcctgcatcctgacgggagtgcagtggtggtagtactgaacaggtctagcaaagatgttcccttgactatcaaagacccagctgtgggctttctggaaaccatttcccctggatactctatccacacctatctctggagaagacagtaatga

SEQ ID NO: 906 - protein, 536 aa, synthetic construct
  REGION 1..536: note = Variant of B-Glucocerebrosidase
MEFSSPSREECPKPLSRVSIMAGSLTGLLLLQAVSWASGARPCIPKSFGYSSVVCVCNATYCDSFDPPTLPALGTFSRYESTRSGRRMELSMGPIQANHTGTGLLLTLQPEQKFQKVKGFGGAMTDAAALNILALSPPAQNLLLKSYFSEEGIGYNIIRVPMASCDFSIRTYTYADTPDDFQLHNFSLPEEDTKLKIPLIHRALQLSQRPVSLFASPWTSPTWLKTNGAVNGKGSLKGQPGDIYHQTWARYFVKFLDAYAEHKLQFWAVTAENEPSAGLLSGYPFQCLGFTPEHQRDFIARDLGPTLANSTHHNVRLLMLDDQRLLLPHWAKVVLTDPEAAKYVHGIAVHWYLDFLAPAKLTLGETHRLFPNTMLFASEACVGSKFWEQSVRLGSWDRGMQYSHSIITNLLYHVVGWTDWNLALNPEGGPNWVRNFVDSPIIVDITKDTFYKQPMFYHLGHFSKFIPEGSQRVGLVASQKNDLDAVALLHPDGSAVVVVLNRSSKDVPLTIKDPAVGFLETISPGYSIHTYLWRRQ

SEQ ID NO: 907 - DNA, 1614 bp, synthetic construct
  misc_feature 1..1614: note = Variant of B-Glucocerebrosidase
  source 1..1614: mol_type = other DNA
atggagttttcttctcctagtagagaagaatgccccaagccactgagcagggtgagcatcatggctggatccctcacagggctgcttcttttgcaggcagtctcatgggcctctggagccaggccctgtattcccaagtcattcggctactcctcagtggtgtgtgtatgcaatgccacctattgtgacagtttcgatcctccaactctccctgctctgggtaccttctcccggtatgagagcacaagaagtggaagacgcatggagctctcaatgggccctatacaggctaaccacactgggacaggtctgctgctgaccctccaacctgaacagaagtttcagaaagtcaagggatttggaggagccatgactgatgcagcagcactcaacatcttggccctgtctccaccagcccagaatctgctgttgaagtcctacttctcagaggaggggattggctacaacatcatccgggttcccatggctagctgtgacttctccattaggacctatacatacgctgacacccccgatgattttcagctccataatttcagtctccctgaagaagacaccaaactgaagatacctctgattcacagagccttgcaactgtcccaaaggccagtgagcctcttcgcttctccctggactagtcctacatggctgaagactaatggtgctgttaatgggaaaggctccctgaaaggacagccaggtgacatatatcatcagacatgggcccgctactttgtgaaattccttgatgcctatgcagagcacaagctccaattctgggcagtcaccgcagaaaacgagccctcagctgggctgctgtctggctacccctttcagtgcttgggctttactcctgagcatcaacgggacttcattgcccgggatttggggccaacactggccaacagcacccaccacaatgtaagactcctcatgctggatgaccagaggctgctgctccctcattgggccaaggtggtgttgacagacccagaagctgccaaatatgttcatggcatcgctgtccactggtacctggattttttggcccctgcaaaggctactctgggagagacccacagactcttccccaataccatgctgtttgcatcagaagcctgcgtggggagcaaattctgggagcagtctgttaggctgggttcctgggatcggggcatgcaatattcccatagtataataactaacctcctctaccacgtggtaggatggacagactggaatctggctttgaacccagaaggaggccccaattgggtgcgcaactttgttgacagccccatcattgtggatatcacaaaggacaccttctacaaacagcctatgttctatcatctggggcactttagcaagttcattccagagggttcccagagagtaggcttggttgcctcacagaagaatgatctggatgctgtggcactcctgcatcctgacgggagtgcagtggtggtagtactgaacaggtctagcattgatgttcccttgactatcaaagacccagctgtgggctttctggaaaccatttcccctggatactctatccacacctatctctggagaagacagtaatga

SEQ ID NO: 908 - protein, 536 aa, synthetic construct
  REGION 1..536: note = Variant of B-Glucocerebrosidase
MEFSSPSREECPKPLSRVSIMAGSLTGLLLLQAVSWASGARPCIPKSFGYSSVVCVCNATYCDSFDPPTLPALGTFSRYESTRSGRRMELSMGPIQANHTGTGLLLTLQPEQKFQKVKGFGGAMTDAAALNILALSPPAQNLLLKSYFSEEGIGYNIIRVPMASCDFSIRTYTYADTPDDFQLHNFSLPEEDTKLKIPLIHRALQLSQRPVSLFASPWTSPTWLKTNGAVNGKGSLKGQPGDIYHQTWARYFVKFLDAYAEHKLQFWAVTAENEPSAGLLSGYPFQCLGFTPEHQRDFIARDLGPTLANSTHHNVRLLMLDDQRLLLPHWAKVVLTDPEAAKYVHGIAVHWYLDFLAPAKATLGETHRLFPNTMLFASEACVGSKFWEQSVRLGSWDRGMQYSHSIITNLLYHVVGWTDWNLALNPEGGPNWVRNFVDSPIIVDITKDTFYKQPMFYHLGHFSKFIPEGSQRVGLVASQKNDLDAVALLHPDGSAVVVVLNRSSIDVPLTIKDPAVGFLETISPGYSIHTYLWRRQ

SEQ ID NO: 909 - DNA, 1614 bp, synthetic construct
  misc_feature 1..1614: note = Variant of B-Glucocerebrosidase
  source 1..1614: mol_type = other DNA
atggagttttcttctcctagtagagaagaatgccccaagccactgagcagggtgagcatcatggctggatccctcacagggctgcttcttttgcaggcagtctcatgggcctctggagccaggccctgtattcccaagtcattcggctactcctcagtggtgtgtgtatgcaatgccacctattgtgacagtttcgatcctccaactctccctgctctgggtaccttctcccggtatgagagcacaagaagtggaagacgcatggagctctcaatgggccctatacaggctaaccacactgggacaggtctgatgctgaccctccaacctgaacagaagtttcagaaagtcaagggatttggaggagccatgactgatgcagcagcactcaacatcttggccctgtctccaccagcccagaatctgctgttgaagtcctacttctcagaggaggggattggctacaacatcatccgggttcccatggctagctgtgacttctccattaggacctatacatacgctgacacccccgatgattttcagctccataatttcagtctccctgaagaagacaccaaactgaagatacctctgattcacagagccttgcaactgtcccaaaggccagtgagcctcttcgcttctccctggactagtcctacatggctgaagactaatggtgctgttaatgggaaaggctccctgaaaggacagccaggtgacatatatcatcagacatgggcccgctactttgtgaaattccttgatgcctatgcagagcacaagctccaattctgggcagtcaccgcagaaaacgagccctcagctgggctgctgtctggctacccctttcagtgcttgggctttactcctgagcatcaacgggacttcattgcccgggatttggggccaacactggccaacagcacccaccacaatgtaagactcctcatgctggatgaccagaggctgctgctccctcattgggccaaggtggtgttgacagacccagaagctgccaaatatgttcatggcatcgctgtccactggtacctggattttttggcccctgcaaaggctactctgggagagacccacagactcttccccaataccatgctgtttgcatcagaagcctgcgtggggagcaaattctgggagcagtctgttaggctgggttcctgggatcggggcatgcaatattcccatagtataataactaacctcctctaccacgtggtaggatggacagactggaatctggctttgaacccagaaggaggccccaattgggtgcgcaactttgttgacagccccatcattgtggatatcacaaaggacaccttctacaaacagcctatgttctatcatctggggcactttagcaagttcattccagagggttcccagagagtaggcttggttgcctcacagaagaatgatctggatgctgtggcactcctgcatcctgacgggagtgcagtggtggtagtactgaacaggtctagcaaagatgttcccttgactatcaaagacccagctgtgggctttctggaaaccatttcccctggatactctatccacacctatctctggagaagacagtaatga

SEQ ID NO: 910 - protein, 536 aa, synthetic construct
  REGION 1..536: note = Variant of B-Glucocerebrosidase
MEFSSPSREECPKPLSRVSIMAGSLTGLLLLQAVSWASGARPCIPKSFGYSSVVCVCNATYCDSFDPPTLPALGTFSRYESTRSGRRMELSMGPIQANHTGTGLMLTLQPEQKFQKVKGFGGAMTDAAALNILALSPPAQNLLLKSYFSEEGIGYNIIRVPMASCDFSIRTYTYADTPDDFQLHNFSLPEEDTKLKIPLIHRALQLSQRPVSLFASPWTSPTWLKTNGAVNGKGSLKGQPGDIYHQTWARYFVKFLDAYAEHKLQFWAVTAENEPSAGLLSGYPFQCLGFTPEHQRDFIARDLGPTLANSTHHNVRLLMLDDQRLLLPHWAKVVLTDPEAAKYVHGIAVHWYLDFLAPAKATLGETHRLFPNTMLFASEACVGSKFWEQSVRLGSWDRGMQYSHSIITNLLYHVVGWTDWNLALNPEGGPNWVRNFVDSPIIVDITKDTFYKQPMFYHLGHFSKFIPEGSQRVGLVASQKNDLDAVALLHPDGSAVVVVLNRSSKDVPLTIKDPAVGFLETISPGYSIHTYLWRRQ

SEQ ID NO: 911 - DNA, 1614 bp, synthetic construct
  misc_feature 1..1614: note = Variant of B-Glucocerebrosidase
  source 1..1614: mol_type = other DNA
atggagttttcttctcctagtagagaagaatgccccaagccactgagcagggtgagcatcatggctggatccctcacagggctgcttcttttgcaggcagtctcatgggcctctggagccaggccctgtattcccaagtcattcggctactcctcagtggtgtgtgtatgcaatgccacctattgtgacagtttcgatcctccaactctccctgctctgggtaccttctcccggtatgagagcacaagaagtggaagacgcatggagctctcaatgggccctatacaggctaaccacactgggacaggtctgctgctgaccctccaacctgaacagaagtttcagatggtcaagggatttggaggagccatgactgatgcagcagcactcaacatcttggccctgtctccaccagcccagaatctgctgttgaagtcctacttctcagaggaggggattggctacaacatcatccgggttcccatggctagctgtgacttctccattaggacctatacatacgctgacacccccgatgattttcagctccataatttcagtctccctgaagaagacaccaaactgaagatacctctgattcacagagccttgcaactgtcccaaaggccagtgagcctcttcgcttctccctggactagtcctacatggctgaagactaatggtgctgttaatgggaaaggctccctgaaaggacagccaggtgacatatatcatcagacatgggcccgctactttgtgaaattccttgatgcctatgcagagcacaagctccaattctgggcagtcaccgcagaaaacgagccctcagctgggctgctgtctggctacccctttcagtgcttgggctttactcctgagcatcaacgggacttcattgcccgggatttggggccaacactggccaacagcacccaccacaatgtaagactcctcatgctggatgaccagaggctgctgctccctcattgggccaaggtggtgttgacagacccagaagctgccaaatatgttcatggcatcgctgtccactggtacctggattttttggcccctgcaaaggctactctgggagagacccacagactcttccccaataccatgctgtttgcatcagaagcctgcgtggggagcaaattctgggagcagtctgttaggctgggttcctgggatcggggcatgcaatattcccatagtataataactaacctcctctaccacgtggtaggatggacagactggaatctggctttgaacccagaaggaggccccaattgggtgcgcaactttgttgacagccccatcattgtggatatcacaaaggacaccttctacaaacagcctatgttctatcatctggggcactttagcaagttcattccagagggttcccagagagtaggcttggttgcctcacagaagaatgatctggatgctgtggcactcctgcatcctgacgggagtgcagtggtggtagtactgaacaggtctagcaaagatgttcccttgactatcaaagacccagctgtgggctttctggaaaccatttcccctggatactctatccacacctatctctggagaagacagtaatga

SEQ ID NO: 912 - protein, 536 aa, synthetic construct
  REGION 1..536: note = Variant of B-Glucocerebrosidase
MEFSSPSREECPKPLSRVSIMAGSLTGLLLLQAVSWASGARPCIPKSFGYSSVVCVCNATYCDSFDPPTLPALGTFSRYESTRSGRRMELSMGPIQANHTGTGLLLTLQPEQKFQMVKGFGGAMTDAAALNILALSPPAQNLLLKSYFSEEGIGYNIIRVPMASCDFSIRTYTYADTPDDFQLHNFSLPEEDTKLKIPLIHRALQLSQRPVSLFASPWTSPTWLKTNGAVNGKGSLKGQPGDIYHQTWARYFVKFLDAYAEHKLQFWAVTAENEPSAGLLSGYPFQCLGFTPEHQRDFIARDLGPTLANSTHHNVRLLMLDDQRLLLPHWAKVVLTDPEAAKYVHGIAVHWYLDFLAPAKATLGETHRLFPNTMLFASEACVGSKFWEQSVRLGSWDRGMQYSHSIITNLLYHVVGWTDWNLALNPEGGPNWVRNFVDSPIIVDITKDTFYKQPMFYHLGHFSKFIPEGSQRVGLVASQKNDLDAVALLHPDGSAVVVVLNRSSKDVPLTIKDPAVGFLETISPGYSIHTYLWRRQ

SEQ ID NO: 913 - DNA, 1614 bp, synthetic construct
  misc_feature 1..1614: note = Variant of B-Glucocerebrosidase
  source 1..1614: mol_type = other DNA
atggagttttcttctcctagtagagaagaatgccccaagccactgagcagggtgagcatcatggctggatccctcacagggctgcttcttttgcaggcagtctcatgggcctctggagccaggccctgtattcccaagtcattcggctactcctcagtggtgtgtgtatgcaatgccacctattgtgacagtttcgatcctccaactctccctgctctgggtaccttctcccggtatgagagcacaagaagtggaagacgcatggagctctcaatgggcccaataatggctaaccacactgggacaggtctgctgctgaccctccaacctgaacagaagtttcagaaagtcaagggatttggaggagccatgactgatgcagcagcactcaacatcttggccctgtctccaccagcccagaatctgctgttgaagtcctacttctcagaggaggggattggctacaacatcatccgggttcccatggctagctgtgacttctccattaggacctatacatacgctgacacccccgatgattttcagctccataatttcagtctccctgaagaagacaccaaactgaagatacctctgattcacagagccttgcaactgtcccaaaggccagtgagcctcttcgcttctccctggactagtcctacatggctgaagactaatggtgctgttaatgggaaaggctccctgaaaggacagccaggtgacatatatcatcagacatgggcccgctactttgtgaaattccttgatgcctatgcagagcacaagctccaattctgggcagtcaccgcagaaaacgagccctcagctgggctgctgtctggctacccctttcagtgcttgggctttactcctgagcatcaacgggacttcattgcccgggatttggggccaacactggccaacagcacccaccacaatgtaagactcctcatgctggatgaccagaggctgctgctccctcattgggccaaggtggtgttgacagacccagaagctgccaaatatgttcatggcatcgctgtccactggtacctggattttttggcccctgcaaaggctactctgggagagacccacagactcttccccaataccatgctgtttgcatcagaagcctgcgtggggagcaaattctgggagcagtctgttaggctgggttcctgggatcggggcatgcaatattcccatagtataataactaacctcctctaccacgtggtaggatggacagactggaatctggctttgaacccagaaggaggccccaattgggtgcgcaactttgttgacagccccatcattgtggatatcacaaaggacaccttctacaaacagcctatgttctatcatctggggcactttagcaagttcattccagagggttcccagagagtaggcttggttgcctcacagaagaatgatctggatgctgtggcactcctgcatcctgacgggagtgcagtggtggtagtactgaacaggtctagcaaagatgttcccttgactatcaaagacccagctgtgggctttctggaaaccatttcccctggatactctatccacacctatctctggagaagacagtaatga

SEQ ID NO: 914 - protein, 536 aa, synthetic construct
  REGION 1..536: note = Variant of B-Glucocerebrosidase
MEFSSPSREECPKPLSRVSIMAGSLTGLLLLQAVSWASGARPCIPKSFGYSSVVCVCNATYCDSFDPPTLPALGTFSRYESTRSGRRMELSMGPIMANHTGTGLLLTLQPEQKFQKVKGFGGAMTDAAALNILALSPPAQNLLLKSYFSEEGIGYNIIRVPMASCDFSIRTYTYADTPDDFQLHNFSLPEEDTKLKIPLIHRALQLSQRPVSLFASPWTSPTWLKTNGAVNGKGSLKGQPGDIYHQTWARYFVKFLDAYAEHKLQFWAVTAENEPSAGLLSGYPFQCLGFTPEHQRDFIARDLGPTLANSTHHNVRLLMLDDQRLLLPHWAKVVLTDPEAAKYVHGIAVHWYLDFLAPAKATLGETHRLFPNTMLFASEACVGSKFWEQSVRLGSWDRGMQYSHSIITNLLYHVVGWTDWNLALNPEGGPNWVRNFVDSPIIVDITKDTFYKQPMFYHLGHFSKFIPEGSQRVGLVASQKNDLDAVALLHPDGSAVVVVLNRSSKDVPLTIKDPAVGFLETISPGYSIHTYLWRRQ

SEQ ID NO: 915 - DNA, 1614 bp, synthetic construct
  misc_feature 1..1614: note = Variant of B-Glucocerebrosidase
  source 1..1614: mol_type = other DNA
atggagttttcttctcctagtagagaagaatgccccaagccactgagcagggtgagcatcatggctggatccctcacagggctgcttcttttgcaggcagtctcatgggcctctggagccaggccctgtattcccaagtcattcggctactcctcagtggtgtgtgtatgcaatgccacctattgtgacagtttcgatcctccaactctccctgctctgggtaccttctcccggtatgagagcacaagaagtggaagacgcatggagctctcaatgggccctatacaggctaaccacactgggacaggtctgctgctgaccctcatgcctgaacagaagtttcagaaagtcaagggatttggaggagccatgactgatgcagcagcactcaacatcttggccctgtctccaccagcccagaatctgctgttgaagtcctacttctcagaggaggggattggctacaacatcatccgggttcccatggctagctgtgacttctccattaggacctatacatacgctgacacccccgatgattttcagctccataatttcagtctccctgaagaagacaccaaactgaagatacctctgattcacagagccttgcaactgtcccaaaggccagtgagcctcttcgcttctccctggactagtcctacatggctgaagactaatggtgctgttaatgggaaaggctccctgaaaggacagccaggtgacatatatcatcagacatgggcccgctactttgtgaaattccttgatgcctatgcagagcacaagctccaattctgggcagtcaccgcagaaaacgagccctcagctgggctgctgtctggctacccctttcagtgcttgggctttactcctgagcatcaacgggacttcattgcccgggatttggggccaacactggccaacagcacccaccacaatgtaagactcctcatgctggatgaccagaggctgctgctccctcattgggccaaggtggtgttgacagacccagaagctgccaaatatgttcatggcatcgctgtccactggtacctggattttttggcccctgcaaaggctactctgggagagacccacagactcttccccaataccatgctgtttgcatcagaagcctgcgtggggagcaaattctgggagcagtctgttaggctgggttcctgggatcggggcatgcaatattcccatagtataataactaacctcctctaccacgtggtaggatggacagactggaatctggctttgaacccagaaggaggccccaattgggtgcgcaactttgttgacagccccatcattgtggatatcacaaaggacaccttctacaaacagcctatgttctatcatctggggcactttagcaagttcattccagagggttcccagagagtaggcttggttgcctcacagaagaatgatctggatgctgtggcactcctgcatcctgacgggagtgcagtggtggtagtactgaacaggtctagcaaagatgttcccttgactatcaaagacccagctgtgggctttctggaaaccatttcccctggatactctatccacacctatctctggagaagacagtaatga

SEQ ID NO: 916 - protein, 536 aa, synthetic construct
  REGION 1..536: note = Variant of B-Glucocerebrosidase
MEFSSPSREECPKPLSRVSIMAGSLTGLLLLQAVSWASGARPCIPKSFGYSSVVCVCNATYCDSFDPPTLPALGTFSRYESTRSGRRMELSMGPIQANHTGTGLLLTLMPEQKFQKVKGFGGAMTDAAALNILALSPPAQNLLLKSYFSEEGIGYNIIRVPMASCDFSIRTYTYADTPDDFQLHNFSLPEEDTKLKIPLIHRALQLSQRPVSLFASPWTSPTWLKTNGAVNGKGSLKGQPGDIYHQTWARYFVKFLDAYAEHKLQFWAVTAENEPSAGLLSGYPFQCLGFTPEHQRDFIARDLGPTLANSTHHNVRLLMLDDQRLLLPHWAKVVLTDPEAAKYVHGIAVHWYLDFLAPAKATLGETHRLFPNTMLFASEACVGSKFWEQSVRLGSWDRGMQYSHSIITNLLYHVVGWTDWNLALNPEGGPNWVRNFVDSPIIVDITKDTFYKQPMFYHLGHFSKFIPEGSQRVGLVASQKNDLDAVALLHPDGSAVVVVLNRSSKDVPLTIKDPAVGFLETISPGYSIHTYLWRRQ

SEQ ID NO: 917 - DNA, 1614 bp, synthetic construct
  misc_feature 1..1614: note = Variant of B-Glucocerebrosidase
  source 1..1614: mol_type = other DNA
atggagttttcttctcctagtagagaagaatgccccaagccactgagcagggtgagcatcatggctggatccctcacagggctgcttcttttgcaggcagtctcatgggcctctggagccaggccctgtattcccaagtcattcggctactcctcagtggtgtgtgtatgcaatgccacctattgtgacagtttcgatcctccaactctccctgctctgggtaccttctcccggtatgagagcacaagaagtggaagacgcatggagctctcaatgggccctatacaggctaaccacactgggacaggtctgctgctgaccctccaacctgaacagaagtttcagaaagtcaagggatttggaggagccatgactgatgcagcagcactcaacatcttggccctgtctccaccagcccagaatctgctgttgaagtcctacttctcagaggaggggattggctacaacatcatccgggttcccatggctagctgtgacttctccattaggtgttatacatacgctgacacccccgatgattttcagctccataatttcagtctccctgaagaagacaccaaactgaagatacctctgattcacagagccttgcaactgtcccaaaggccagtgagcctcttcgcttctccctggactagtcctacatggctgaagactaatggtgctgttaatgggaaaggctccctgaaaggacagccaggtgacatatatcatcagacatgggcccgctactttgtgaaattccttgatgcctatgcagagcacaagctccaattctgggcagtcaccgcagaaaacgagccctcagctgggctgctgtctggctacccctttcagtgcttgggctttactcctgagcatcaacgggacttcattgcccgggatttggggccaacactggccaacagcacccaccacaatgtaagactcctcatgctggatgaccagaggctgctgctccctcattgggccaaggtggtgttgacagacccagaagctgccaaatatgttcatggcatcgctgtccactggtacctggattttttggcccctgcaaaggctactctgggagagacccacagactcttccccaataccatgctgtttgcatcagaagcctgcgtggggagcaaattctgggagcagtctgttaggctgggttcctgggatcggggcatgcaatattcccatagtataataactaacctcctctaccacgtggtaggatggacagactggaatctggctttgaacccagaaggaggccccaattgggtgcgcaactttgttgacagccccatcattgtggatatcacaaaggacaccttctacaaacagcctatgttctatcatctggggcactttagcaagttcattccagagggttcccagagagtaggcttggttgcctcacagaagaatgatctggatgctgtggcactcctgcatcctgacgggagtgcagtggtggtagtactgaacaggtctagcaaagatgttcccttgactatcaaagacccagctgtgggctttctggaaaccatttcccctggatactctatccacacctatctctggagaagacagtaatga

SEQ ID NO: 918 - protein, 536 aa, synthetic construct
  REGION 1..536: note = Variant of B-Glucocerebrosidase
MEFSSPSREECPKPLSRVSIMAGSLTGLLLLQAVSWASGARPCIPKSFGYSSVVCVCNATYCDSFDPPTLPALGTFSRYESTRSGRRMELSMGPIQANHTGTGLLLTLQPEQKFQKVKGFGGAMTDAAALNILALSPPAQNLLLKSYFSEEGIGYNIIRVPMASCDFSIRCYTYADTPDDFQLHNFSLPEEDTKLKIPLIHRALQLSQRPVSLFASPWTSPTWLKTNGAVNGKGSLKGQPGDIYHQTWARYFVKFLDAYAEHKLQFWAVTAENEPSAGLLSGYPFQCLGFTPEHQRDFIARDLGPTLANSTHHNVRLLMLDDQRLLLPHWAKVVLTDPEAAKYVHGIAVHWYLDFLAPAKATLGETHRLFPNTMLFASEACVGSKFWEQSVRLGSWDRGMQYSHSIITNLLYHVVGWTDWNLALNPEGGPNWVRNFVDSPIIVDITKDTFYKQPMFYHLGHFSKFIPEGSQRVGLVASQKNDLDAVALLHPDGSAVVVVLNRSSKDVPLTIKDPAVGFLETISPGYSIHTYLWRRQ

SEQ ID NO: 919 - DNA, 1614 bp, synthetic construct
  misc_feature 1..1614: note = Variant of B-Glucocerebrosidase
  source 1..1614: mol_type = other DNA
atggagttttcttctcctagtagagaagaatgccccaagccactgagcagggtgagcatcatggctggatccctcacagggctgcttcttttgcaggcagtctcatgggcctctggagccaggccctgtattcccaagtcattcggctactcctcagtggtgtgtgtatgcaatgccacctattgtgacagtttcgatcctccaactctccctgctctgggtaccttctcccggtatgagagcacaagaagtggaagacgcatggagctctcaatgggccctatacaggctaaccacactgggacaggtctgctgctgaccctccaacctgaacagaagtttcagaaagtcaagggatttggaggagccatgactgatgcagcagcactcaacatcttggccctgtctccaccagcccagaatctgctgttgaagtcctacttctcagaggaggggattggctacaacatcatccgggttcccatggctagctgtgacttctccattaggacctatacatacgctgacacccccgatgattttcagctccataatttcagtctccctgaagaagacaccaaactgaagatacctctgattcacagagccttgcaactgtcccaaaggccagtgagcctcttcgcttctccctggactagtcctacatggctgaagactaatggtgctgttaatgggaaaggctccctgaaaggacagccaggtgacatatatcatcagacatgggcccgctactttgtgaaattccttgatgcctatgcagagcacaagctccaattctgggcagtcaccgcagaaaacgagccctcagctgggctgctgtctggctacccctttcagtgcttgggctttactcctgagcatcaacgggacttcattgcccgggatttggggccaacactggccaacagcacccaccacaatgtaagactcctcatgctggatgaccagaggctgctgctccctcattgggccaaggtggtgttgacagacccagaagctgccaaatatgttcatggcatcgctgtccactggtacctggattttttggcccctgcaaaggctactctgggagagacccacagactcttccccaataccatgctgtttgcatcagaagcctgcgtggggagcaaattctgggagcagtctgttaggctgggttcctgggatcggggcatgcaatattcccatagtataataactaacctcctctaccacgtggtaggatggacagactggaatctggctttgaacccagaaggaggccccaattgggtgcgcaactttgttgacagccccatcattgtggatatcacaaaggacaccttctacaaacagcctatgttctatcatctggggcactttagcaagttcattccagagggttcccagagagtaggcttggttgcctcacagaagaatgatctggatgctgtggcactcctgcatcctgacgggagtgcagtggtggtagtactgaacaggtctagcaaagatgttcccttgactatcaaagacccagctgtgggctttctggaaaccatttcccctggatactctatccacacctatctctggagaagaatgtaatga

SEQ ID NO: 920 - protein, 536 aa, synthetic construct
  REGION 1..536: note = Variant of B-Glucocerebrosidase
MEFSSPSREECPKPLSRVSIMAGSLTGLLLLQAVSWASGARPCIPKSFGYSSVVCVCNATYCDSFDPPTLPALGTFSRYESTRSGRRMELSMGPIQANHTGTGLLLTLQPEQKFQKVKGFGGAMTDAAALNILALSPPAQNLLLKSYFSEEGIGYNIIRVPMASCDFSIRTYTYADTPDDFQLHNFSLPEEDTKLKIPLIHRALQLSQRPVSLFASPWTSPTWLKTNGAVNGKGSLKGQPGDIYHQTWARYFVKFLDAYAEHKLQFWAVTAENEPSAGLLSGYPFQCLGFTPEHQRDFIARDLGPTLANSTHHNVRLLMLDDQRLLLPHWAKVVLTDPEAAKYVHGIAVHWYLDFLAPAKATLGETHRLFPNTMLFASEACVGSKFWEQSVRLGSWDRGMQYSHSIITNLLYHVVGWTDWNLALNPEGGPNWVRNFVDSPIIVDITKDTFYKQPMFYHLGHFSKFIPEGSQRVGLVASQKNDLDAVALLHPDGSAVVVVLNRSSKDVPLTIKDPAVGFLETISPGYSIHTYLWRRM

SEQ ID NO: 921 - DNA, 1614 bp, synthetic construct
  misc_feature 1..1614: note = Variant of B-Glucocerebrosidase
  source 1..1614: mol_type = other DNA
atggagttttcttctcctagtagagaagaatgccccaagccactgagcagggtgagcatcatggctggatccctcacagggctgcttcttttgcaggcagtctcatgggcctctggagccaggccctgtattcccaagtcattcggctactcctcagtggtgtgtgtatgcaatgccacctattgtgacagtttcgatcctccaactctccctgctctgggtaccttctcccggtatgagagcacaagaagtggaagacgcatggagctctcaatgggccctatacaggctaaccacactgggacaggtctgctgctgaccctccaacctgaacagaagtttcagaaagtcaagggatttggaggagccatgactgatgcagcagcactcaacatcttggccctgtctccaccagcccagaatctgctgttgaagtcctacttctcagagttggggattggctacaacatcatccgggttcccatggctagctgtgacttctccattaggacctatacatacgctgacacccccgatgattttcagctccataatttcagtctccctgaagaagacaccaaactgaagatacctctgattcacagagccttgcaactgtcccaaaggccagtgagcctcttcgcttctccctggactagtcctacatggctgaagactaatggtgctgttaatgggaaaggctccctgaaaggacagccaggtgacatatatcatcagacatgggcccgctactttgtgaaattccttgatgcctatgcagagcacaagctccaattctgggcagtcaccgcagaaaacgagccctcagctgggctgctgtctggctacccctttcagtgcttgggctttactcctgagcatcaacgggacttcattgcccgggatttggggccaacactggccaacagcacccaccacaatgtaagactcctcatgctggatgaccagaggctgctgctccctcattgggccaaggtggtgttgacagacccagaagctgccaaatatgttcatggcatcgctgtccactggtacctggattttttggcccctgcaaaggctactctgggagagacccacagactcttccccaataccatgctgtttgcatcagaagcctgcgtggggagcaaattctgggagcagtctgttaggctgggttcctgggatcggggcatgcaatattcccatagtataataactaacctcctctaccacgtggtaggatggacagactggaatctggctttgaacccagaaggaggccccaattgggtgcgcaactttgttgacagccccatcattgtggatatcacaaaggacaccttctacaaacagcctatgttctatcatctggggcactttagcaagttcattccagagggttcccagagagtaggcttggttgcctcacagaagaatgatctggatgctgtggcactcctgcatcctgacgggagtgcagtggtggtagtactgaacaggtctagcaaagatgttcccttgactatcaaagacccagctgtgggctttctggaaaccatttcccctggatactctatccacacctatctctggagaagacagtaatga

SEQ ID NO: 922 - protein, 536 aa, synthetic construct
  REGION 1..536: note = Variant of B-Glucocerebrosidase
MEFSSPSREECPKPLSRVSIMAGSLTGLLLLQAVSWASGARPCIPKSFGYSSVVCVCNATYCDSFDPPTLPALGTFSRYESTRSGRRMELSMGPIQANHTGTGLLLTLQPEQKFQKVKGFGGAMTDAAALNILALSPPAQNLLLKSYFSELGIGYNIIRVPMASCDFSIRTYTYADTPDDFQLHNFSLPEEDTKLKIPLIHRALQLSQRPVSLFASPWTSPTWLKTNGAVNGKGSLKGQPGDIYHQTWARYFVKFLDAYAEHKLQFWAVTAENEPSAGLLSGYPFQCLGFTPEHQRDFIARDLGPTLANSTHHNVRLLMLDDQRLLLPHWAKVVLTDPEAAKYVHGIAVHWYLDFLAPAKATLGETHRLFPNTMLFASEACVGSKFWEQSVRLGSWDRGMQYSHSIITNLLYHVVGWTDWNLALNPEGGPNWVRNFVDSPIIVDITKDTFYKQPMFYHLGHFSKFIPEGSQRVGLVASQKNDLDAVALLHPDGSAVVVVLNRSSKDVPLTIKDPAVGFLETISPGYSIHTYLWRRQ

SEQ ID NO: 923 - DNA, 1614 bp, synthetic construct
  misc_feature 1..1614: note = Variant of B-Glucocerebrosidase
  source 1..1614: mol_type = other DNA
atggagttttcttctcctagtagagaagaatgccccaagccactgagcagggtgagcatcatggctggatccctcacagggctgcttcttttgcaggcagtctcatgggcctctggagccaggccctgtattcccaagtcattcggctactcctcagtggtgtgtgtatgcaatgccacctattgtgacagtgtcgatcctctcactctccctgctctgggtaccttctcccggtatgagagcacaagaagtggaagacgcatggagctctcaatgggccctatacaggctaaccgcactgggacaggtctgctgctgaccctccaacctgaacagaagtttcagaaagtcaagggatttggaggagccatgactgatgcagcagcactcaacatcttggccctgtctccaccagcccagaacctgctgttgaagtcctacttctcagaggaggggattgagtacaacatcatccgggttcccatggctagctgtgacttctccattaggacctatacatacgctgacacccccgatgattttcagctccataatttcagtctccctgaagaagacaccaaatggaagatacctctgattcacagagccttgcaactgtcccaaaggccagtgagcctcttcgcttctccctggactagtcctacatggctgaagactaatggtgctctgaatgggaaaggctccctgaaaggacagccaggtgacatatatcatcagacatgggcccgctactttgtgaaattccttgatgcctatgcagagcacaagctccaattctgggcagtcaccgcagaaaacgagccctcagctgggctgctgtctggctacccctttcagtgcttgggctttactcctgagcatcaacgggacttcattgcccgggatttggggccaacactggccaacagcacccaccacaatgtaagactcctcattctggatgaccagaggctgctgctccctcattgggccaaggtggtgttgacagacccagaagctgccaaatatgttcatggcatcgctgtccactggtacctggattttttggcccctgccaagtggactctgggagagacccacagactcttccccaataccatgctgtttgcatcagaagcctgcgtggggagcaaattctgggagcagtctgttaggctgggttcctgggatcggggcatgcaatattcccatagtataataactaacctcctctaccacgtggtaggatggacagactggaatctggctttgaacccagaaggaggccccaattgggtgcgcaactttgttgacagccccatcattgtggatatcacaaaggacaccttctacaaacagcctatgttctatcatctggggcactttagcaagttcattccagagggttcccagagagtaggcttggttgcctcacagaagaatgatctggatgctgtggcactcctgcatcctgacgggagtgcagtggtggtagtactgaacaggtctagcaaagatgttcccttgactatcaaagaccctgctgtgggctttctggaaaccatttcccctggatactctatccacacctatctctggagaagacagtaatga

SEQ ID NO: 924 - protein, 536 aa, synthetic construct
  REGION 1..536: note = Variant of B-Glucocerebrosidase
MEFSSPSREECPKPLSRVSIMAGSLTGLLLLQAVSWASGARPCIPKSFGYSSVVCVCNATYCDSVDPLTLPALGTFSRYESTRSGRRMELSMGPIQANRTGTGLLLTLQPEQKFQKVKGFGGAMTDAAALNILALSPPAQNLLLKSYFSEEGIEYNIIRVPMASCDFSIRTYTYADTPDDFQLHNFSLPEEDTKWKIPLIHRALQLSQRPVSLFASPWTSPTWLKTNGALNGKGSLKGQPGDIYHQTWARYFVKFLDAYAEHKLQFWAVTAENEPSAGLLSGYPFQCLGFTPEHQRDFIARDLGPTLANSTHHNVRLLILDDQRLLLPHWAKVVLTDPEAAKYVHGIAVHWYLDFLAPAKWTLGETHRLFPNTMLFASEACVGSKFWEQSVRLGSWDRGMQYSHSIITNLLYHVVGWTDWNLALNPEGGPNWVRNFVDSPIIVDITKDTFYKQPMFYHLGHFSKFIPEGSQRVGLVASQKNDLDAVALLHPDGSAVVVVLNRSSKDVPLTIKDPAVGFLETISPGYSIHTYLWRRQ

SEQ ID NO: 925 - DNA, 1614 bp, synthetic construct
  misc_feature 1..1614: note = Variant of B-Glucocerebrosidase
  source 1..1614: mol_type = other DNA
atggagttttcttctcctagtagagaagaatgccccaagccactgagcagggtgagcatcatggctggatccctcacagggctgcttcttttgcaggcagtctcatgggcctctggagccaggccctgtattcccaagtcattcggctactcctcagtggtgtgtgtatgcaatgccacctattgtgacagtctcgatcctctcactctccctgctctgggtaccttctcccggtatgagagcacaagaagtggaagacgcatggagctctcaatgggccctatacaggctaaccgcactgggacaggtctgctgctgaccctccaacctgaacagaagtttcagaaagtcaagggatttggaggagccatgactgatgcagcagcactcaacatcttggccctgtctccaccagcccagaacctgctgttgaagtcctacttctcagaggaggggattgagtacaacatcatccgggttcccatggctagctgtgacttctccattaggacctatacatacgctgacacccccgatgattttcagctccataatttcagtctccctgaagaagacaccaaactgaagatacctctgattcacagagccttgcaactgtcccaaaggccagtgagcctcttcgcttctccctggactagtcctacatggctgaagactaatggtgctctgaatgggaaaggctccctgaaaggacagccaggtgacatatatcatcagacatgggcccgctactttgtgaaattccttgatgcctatgcagagcacaaactccaattctgggcagtcaccgcagaaaacgagccctcagctgggctgctgtctggctacccctttcagtgcttgggctttactcctgagcatcaacgggacttcattgcccgggatttggggccaacactggccaacagcacccaccacaatgtaagactcctcattctggatgaccagaggctgctgctccctcattgggccaaggtggtgttgacagacccagaagctgccaaatatgttcatggcatcgctgtccactggtacctggattttttggcccctgcaaaggctactctgggagagacccacagactcttccccaataccatgctgtttgcatcagaagcctgcgtggggagcaaattctgggagcagtctgttaggctgggttcctgggatcggggcatgcaatattcccatagtataataactaacctcctctaccacgtggtaggatggacagactggaatctggctttgaacccagaaggaggccccaattgggtgcgcaactttgttgacagccccatcattgtggatatcacaaaggacaccttctacaaacagcctatgttctatcatctggggcactttagcaagttcattccagagggttcccagagagtaggcttggttgcctcacagaagaatgatctggatgctgtggcactcctgcatcctgacgggagtgcagtggtggtagtactgaacaggtctagcaaagatgttcccttgactatcaaagacgaggctgtgggctttctggaaaccatttcccctggatactctatccacacctatctctggagaagacagtaatga

SEQ ID NO: 926 - protein, 536 aa, synthetic construct
  REGION 1..536: note = Variant of B-Glucocerebrosidase
MEFSSPSREECPKPLSRVSIMAGSLTGLLLLQAVSWASGARPCIPKSFGYSSVVCVCNATYCDSLDPLTLPALGTFSRYESTRSGRRMELSMGPIQANRTGTGLLLTLQPEQKFQKVKGFGGAMTDAAALNILALSPPAQNLLLKSYFSEEGIEYNIIRVPMASCDFSIRTYTYADTPDDFQLHNFSLPEEDTKLKIPLIHRALQLSQRPVSLFASPWTSPTWLKTNGALNGKGSLKGQPGDIYHQTWARYFVKFLDAYAEHKLQFWAVTAENEPSAGLLSGYPFQCLGFTPEHQRDFIARDLGPTLANSTHHNVRLLILDDQRLLLPHWAKVVLTDPEAAKYVHGIAVHWYLDFLAPAKATLGETHRLFPNTMLFASEACVGSKFWEQSVRLGSWDRGMQYSHSIITNLLYHVVGWTDWNLALNPEGGPNWVRNFVDSPIIVDITKDTFYKQPMFYHLGHFSKFIPEGSQRVGLVASQKNDLDAVALLHPDGSAVVVVLNRSSKDVPLTIKDEAVGFLETISPGYSIHTYLWRRQ

SEQ ID NO: 927 - DNA, 1614 bp, synthetic construct
  misc_feature 1..1614: note = Variant of B-Glucocerebrosidase
  source 1..1614: mol_type = other DNA
atggagttttcttctcctagtagagaagaatgccccaagccactgagcagggtgagcatcatggctggatccctcacagggctgcttcttttgcaggcagtctcatgggcctctggagccaggccctgtattcccaagtcattcggctactcctcagtggtgtgtgtatgcaatgccacctattgtgacagtctcgatcctctcactctccctgctctgggtaccttctcccgggttgagagcacaagaagtggaagacgcatggagctctcaatgggccctatacaggctaaccgcactgggacaggtctgctgctgaccctccaacctgaacagaagtttcagaaagtcaagggatttggaggagccatgactgatgcagcagcactcaacatcttggccctgtctccaccagcccagaacctgctgttgaagtcctacttctcagaggaggggattgagtacaacatcatccgggttcccatggctagctgtgacttctccattaggacctatacatacgctgacacccccgatgattttcagctccataatttcagtctccctgaagaagacaccaaatggaagatacctctgattcacagagccttgcaactgtcccaaaggccagtgagcctcttcgcttctccctggactagtcctacatggctgaagactaatggtgctctcaatgggaagggctccctgaaaggacagccaggtgacatatatcatcagacatgggcccgctactttgtgaaattccttgatgcctatgcagagcacgggctccaattctgggcagtcaccgcagaaaacgagccctcagctgggctgctgtctggctacccctttcagtgcttgggctttactcctgagcatcaacgggacttcattgcccgggatttggggccaacactggccaacagcacccaccacaatgtaagactcctcattctggatgaccagaggctgctgctccctcattgggccaaggtggtgttgacagacccagaagctgccaaatatgttcatggcatcgctgtccactggtacctggattttttggcccctgccaagtggactctgggagagacccacagactcttccccaataccatgctgtttgcatcagaagcctgcgtggggagcaaattctgggagcagtctgttaggctgggttcctgggatcggggcatgcaatattcccatagtataataactaacctcctctaccacgtggtaggatggacagactggaatctggctttgaacccagaaggaggccccaattgggtgcgcaactttgttgacagccccatcattgtggatatcacaaaggacaccttctacaaacagcctatgttctatcatctggggcactttagcaagttcattccagagggttcccagagagtaggcttggttgcctcacagaagaatgatctggatgctgtggcactcctgcatcctgacgggagtgcagtggtggtagtactgaacaggtctagcaaagatgttcccttgactatcaaagacccagctgtgggctttctggaaaccatttcccctggatactctatccacacctatctctggagaagacagtaatga

SEQ ID NO: 928 - protein, 536 aa, synthetic construct
  REGION 1..536: note = Variant of B-Glucocerebrosidase
MEFSSPSREECPKPLSRVSIMAGSLTGLLLLQAVSWASGARPCIPKSFGYSSVVCVCNATYCDSLDPLTLPALGTFSRVESTRSGRRMELSMGPIQANRTGTGLLLTLQPEQKFQKVKGFGGAMTDAAALNILALSPPAQNLLLKSYFSEEGIEYNIIRVPMASCDFSIRTYTYADTPDDFQLHNFSLPEEDTKWKIPLIHRALQLSQRPVSLFASPWTSPTWLKTNGALNGKGSLKGQPGDIYHQTWARYFVKFLDAYAEHGLQFWAVTAENEPSAGLLSGYPFQCLGFTPEHQRDFIARDLGPTLANSTHHNVRLLILDDQRLLLPHWAKVVLTDPEAAKYVHGIAVHWYLDFLAPAKWTLGETHRLFPNTMLFASEACVGSKFWEQSVRLGSWDRGMQYSHSIITNLLYHVVGWTDWNLALNPEGGPNWVRNFVDSPIIVDITKDTFYKQPMFYHLGHFSKFIPEGSQRVGLVASQKNDLDAVALLHPDGSAVVVVLNRSSKDVPLTIKDPAVGFLETISPGYSIHTYLWRRQ

SEQ ID NO: 929 - DNA, 1614 bp, synthetic construct
  misc_feature 1..1614: note = Variant of B-Glucocerebrosidase
  source 1..1614: mol_type = other DNA
atggagttttcttctcctagtagagaagaatgccccaagccactgagcagggtgagcatcatggctggatccctcacagggctgcttcttttgcaggcagtctcatgggcctctggagccaggccctgtattcccaagtcattcggctactcctcagtggtgtgtgtatgcaatgccacctattgtgacagtgtcgatcctctcactctccctgctctgggtaccttctcccggtatgagagcacaagaagtggaagacgcatggagctctcaatgggccctatacaggctaaccgcactgggacaggtctgctgctgaccctccaacctgaacagaagtttcagaaagtcaagggatttggaggagccatgactgatgcagcagcactcaacatcttggccctgtctccaccagcccagaacctgctgttgaagtcctacttctcagaggaggggattgagtacaacatcatccgggttcccatggctagctgtgacttctccattaggacctatacatacgctgacacccccgatgattttcagctccataatttcagtctccctgaagaagacaccaaactgaagatacctctgattcacagagccttgcaactgtcccaaaggccagtgagcctcttcgcttctccctggactagtcctacatggctgaagactaatggtgctctgaatgggaaaggctccctgaaaggacagccaggtgacatatatcatcagacatgggcccgctactttgtgaaattccttgatgcctatgcagagcacaagctccaattctgggcagtcaccgcagaaaacgagccctcagctgggctgctgtctggctacccctttcagtgcttgggctttactcctgagcatcaacgggacttcattgcccgggatttggggccaacactggccaacagcacccaccacaatgtaagactcctcattctggatgaccagaggctgctgctccctcattgggccaaggtggtgttgacagacccagaagctgccaaatatgttcatggcatcgctgtccactggtacctggattttttggcccctgccaaggccactctgggagagacccacagactcttccccaataccacactgtttgcatcagaagcctgcgtggggagcaaattctgggagcagtctgttaggctgggttcctgggatcggggcatgcaatattcccatagtataataactaacctcctctaccacgtggtaggatggacagactggaatctggctttgaacccagaaggaggccccaattgggtgcgcaactttgttgacagccccatcattgtggatatcacaaaggacaccttctacaaacagcctatgttctatcatctggggcactttagcaagttcattccagagggttcccagagagtaggcttggttgcctcacagaagaatgatctggatgctgtggcactcctgcatcctgacgggagtgcagtggtggtagtactgaacaggtctagcaaagatgttcccttgactatcaaagacccagctgtgggctttctggaaaccatttcccctggatactctatccacacctatctctggagaagacagtaatga

SEQ ID NO: 930 - protein, 536 aa, synthetic construct
  REGION 1..536: note = Variant of B-Glucocerebrosidase
MEFSSPSREECPKPLSRVSIMAGSLTGLLLLQAVSWASGARPCIPKSFGYSSVVCVCNATYCDSVDPLTLPALGTFSRYESTRSGRRMELSMGPIQANRTGTGLLLTLQPEQKFQKVKGFGGAMTDAAALNILALSPPAQNLLLKSYFSEEGIEYNIIRVPMASCDFSIRTYTYADTPDDFQLHNFSLPEEDTKLKIPLIHRALQLSQRPVSLFASPWTSPTWLKTNGALNGKGSLKGQPGDIYHQTWARYFVKFLDAYAEHKLQFWAVTAENEPSAGLLSGYPFQCLGFTPEHQRDFIARDLGPTLANSTHHNVRLLILDDQRLLLPHWAKVVLTDPEAAKYVHGIAVHWYLDFLAPAKATLGETHRLFPNTTLFASEACVGSKFWEQSVRLGSWDRGMQYSHSIITNLLYHVVGWTDWNLALNPEGGPNWVRNFVDSPIIVDITKDTFYKQPMFYHLGHFSKFIPEGSQRVGLVASQKNDLDAVALLHPDGSAVVVVLNRSSKDVPLTIKDPAVGFLETISPGYSIHTYLWRRQ

SEQ ID NO: 931 - DNA, 1614 bp, synthetic construct
  misc_feature 1..1614: note = Variant of B-Glucocerebrosidase
  source 1..1614: mol_type = other DNA
atggagttttcttctcctagtagagaagaatgccccaagccactgagcagggtgagcatcatggctggatccctcacagggctgcttcttttgcaggcagtctcatgggcctctggagccaggccctgtattcccaagtcattcggctactcctcagtggtgtgtgtatgcaatgccacctattgtgacagtctcgatcctctcactctccctgctctgggtaccttctcccgggttgagagcacaagaagtggaagacgcatggagctctcaatgggccctatacaggctaaccgcactgggacaggtctgctgctgaccctccaacctgaacagaagtttcagaaagtcaagggatttggaggagccatgactgatgcagcagcactcaacatcttggccctgtctccaccagcccagaacctgctgttgaagtcctacttctcagaggaggggattgagtacaacatcatccgggttcccatggctagctgtgacttctccattaggacctatacatacgctgacacccccgatgattttcagctccataatttcagtctccctgaagaagacaccaaatggaagatacctctgattcacagagccttgcaactgtcccaaaggccagtgagcctcttcgcttctccctggactagtcctacatggctgaagactaatggtgctctgaatgggaaaggctccctgaaaggacagccaggtgacatatatcatcagacatgggcccgctactttgtgaaattccttgatgcctatgcagagcacaagctccaattctgggcagtcaccgcagaaaacgagccctcagctgggctgctgtctggctacccctttcagtgcttgggctttactcctgagcatcaacgggacttcattgcccgggatttggggccaacactggccaacagcacccaccacaatgtaagactcctcattctggatgaccagaggctgctgctccctcattgggccaaggtggtgttgacagacccagaagctgccaaatatgttcatggcatcgctgtccactggtacctggattttttggcccctgcaaaggctactctgggagagacccacagactcttccccaataccatgctgtttgcatcagaagcctgcgtggggagcaaattctgggagcagtctgttaggctgggttcctgggatcggggcatgcaatattcccatagtataataactaacctcctctaccacgtggtaggatggacagactggaatctggctttgaacccagaaggaggccccaattgggtgcgcaactttgttgacagccccatcattgtggatatcacaaaggacaccttctacaaacagcctatgttctatcatctggggcactttagcaagttcattccagagggttcccagagagtaggcttggttgcctcacagaagaatgatctggatgctgtggcactcctgcatcctgacgggagtgcagtggtggtagtactgaacaggtctagcaaagatgttcccttgactatcaaagacccagctgtgggctttctggaaaccatttcccctggatactctatccacacctatctctggagaagacagtaatga

SEQ ID NO: 932 - protein, 536 aa, synthetic construct
  REGION 1..536: note = Variant of B-Glucocerebrosidase
MEFSSPSREECPKPLSRVSIMAGSLTGLLLLQAVSWASGARPCIPKSFGYSSVVCVCNATYCDSLDPLTLPALGTFSRVESTRSGRRMELSMGPIQANRTGTGLLLTLQPEQKFQKVKGFGGAMTDAAALNILALSPPAQNLLLKSYFSEEGIEYNIIRVPMASCDFSIRTYTYADTPDDFQLHNFSLPEEDTKWKIPLIHRALQLSQRPVSLFASPWTSPTWLKTNGALNGKGSLKGQPGDIYHQTWARYFVKFLDAYAEHKLQFWAVTAENEPSAGLLSGYPFQCLGFTPEHQRDFIARDLGPTLANSTHHNVRLLILDDQRLLLPHWAKVVLTDPEAAKYVHGIAVHWYLDFLAPAKATLGETHRLFPNTMLFASEACVGSKFWEQSVRLGSWDRGMQYSHSIITNLLYHVVGWTDWNLALNPEGGPNWVRNFVDSPIIVDITKDTFYKQPMFYHLGHFSKFIPEGSQRVGLVASQKNDLDAVALLHPDGSAVVVVLNRSSKDVPLTIKDPAVGFLETISPGYSIHTYLWRRQ

SEQ ID NO: 933 - DNA, 1614 bp, synthetic construct
  misc_feature 1..1614: note = Variant of B-Glucocerebrosidase
  source 1..1614: mol_type = other DNA
atggagttttcttctcctagtagagaagaatgccccaagccactgagcagggtgagcatcatggctggatccctcacagggctgcttcttttgcaggcagtctcatgggcctctggagccaggccctgtattcccaagtcattcggctactcctcagtggtgtgtgtatgcaatgccacctattgtgacagtgtcgatcctctcactctccctgctctgggtaccttctcccggtatgagagcacaagaagtggaagacgcatggagctctcaatgggccctatacaggctaaccgcactgggacaggtctgctgctgaccctccaacctgaacagaagtttcagaaagtcaagggatttggaggagccatgactgatgcagcagcactcaacatcttggccctgtctccaccagcccagaacctgctgttgaagtcctacttctcagaggaggggattgagtacaacatcatccgggttcccatggctagctgtgacttctccattaggacctatacatacgctgacacccccgatgattttcagctccataatttcagtctccctgaagaagacaccaaactgaagatacctctgattcacagagccttgcaactgtcccaaaggccagtgagcctcttcgcttctccctggactagtcctacatggctgaagactaatggtgcttacaatgggaagggctccctgaaaggacagccaggtgacatatatcatcagacatgggcccgctactttgtgaaattccttgatgcctatgcagagcacaagctccaattctgggcagtcaccgcagaaaacgagccctcagctgggctgctgtctggctacccctttcagtgcttgggctttactcctgagcatcaacgggacttcattgcccgggatttggggccaacactggccaacagcacccaccacaatgtaagactcctcattctggatgaccagaggctgctgctccctcattgggccaaggtggtgttgacagacccagaagctgccaaatatgttcatggcatcgctgtccactggtacctggattttttggcccctgcaaaggctactctgggagagacccacagactcttccccaataccatgctgtttgcatcagaagcctgcgtggggagcaaattctgggagcagtctgttaggctgggttcctgggatcggggcatgcaatattcccatagtataataactaacctcctctaccacgtggtaggatggacagactggaatctggctttgaacccagaaggaggccccaattgggtgcgcaactttgttgacagccccatcattgtggatatcacaaaggacaccttctacaaacagcctatgttctatcatctggggcactttagcaagttcattccagagggttcccagagagtaggcttggttgcctcacagaagaatgatctggatgctgtggcactcctgcatcctgacgggagtgcagtggtggtagtactgaacaggtctagcaaagatgttcccttgactatcaaagaccctgctgtgggctttctggaaaccatttcccctggatactctatccacacctatctctggagaagacagtaatga

SEQ ID NO: 934 - protein, 536 aa, synthetic construct
  REGION 1..536: note = Variant of B-Glucocerebrosidase
MEFSSPSREECPKPLSRVSIMAGSLTGLLLLQAVSWASGARPCIPKSFGYSSVVCVCNATYCDSVDPLTLPALGTFSRYESTRSGRRMELSMGPIQANRTGTGLLLTLQPEQKFQKVKGFGGAMTDAAALNILALSPPAQNLLLKSYFSEEGIEYNIIRVPMASCDFSIRTYTYADTPDDFQLHNFSLPEEDTKLKIPLIHRALQLSQRPVSLFASPWTSPTWLKTNGAYNGKGSLKGQPGDIYHQTWARYFVKFLDAYAEHKLQFWAVTAENEPSAGLLSGYPFQCLGFTPEHQRDFIARDLGPTLANSTHHNVRLLILDDQRLLLPHWAKVVLTDPEAAKYVHGIAVHWYLDFLAPAKATLGETHRLFPNTMLFASEACVGSKFWEQSVRLGSWDRGMQYSHSIITNLLYHVVGWTDWNLALNPEGGPNWVRNFVDSPIIVDITKDTFYKQPMFYHLGHFSKFIPEGSQRVGLVASQKNDLDAVALLHPDGSAVVVVLNRSSKDVPLTIKDPAVGFLETISPGYSIHTYLWRRQ

SEQ ID NO: 935 - DNA, 1614 bp, synthetic construct
  misc_feature 1..1614: note = Variant of B-Glucocerebrosidase
  source 1..1614: mol_type = other DNA
atggagttttcttctcctagtagagaagaatgccccaagccactgagcagggtgagcatcatggctggatccctcacagggctgcttcttttgcaggcagtctcatgggcctctggagccaggccctgtattcccaagtcattcggctactcctcagtggtgtgtgtatgcaatgccacctattgtgacagtgtcgatcctctcactctccctgctctgggtaccttctcccggtatgagagcacaagaagtggaagacgcatggagctctcaatgggccctatacaggctaaccgcactgggacaggtctgctgctgaccctccaacctgaacagaagtttcagaaagtcaagggatttggaggagccatgactgatgcagcagcactcaacatcttggccctgtctccaccagcccagaacctgctgttgaagtcctacttctcagaggaggggattgagtacaacatcatccgggttcccatggctagctgtgacttctccattaggacctatacatacgctgacacccccgatgattttcagctccataatttcagtctccctgaagaagacaccaaactgaagatacctctgattcacagagccttgcaactgtcccaaaggccagtgagcctcttcgcttctccctggactagtcctacatggctgaagactaatggtgctctcaatggggcaggctccctgaaaggacagccaggtgacatatatcatcagacatgggcccgctactttgtgaaattccttgatgcctatgcagagcacgggctccaattctgggcagtcaccgcagaaaacgagccctcagctgggctgctgtctggctacccctttcagtgcttgggctttactcctgagcatcaacgggacttcattgcccgggatttggggccaacactggccaacagcacccaccacaatgtaagactcctcattctggatgaccagaggctgctgctccctcattgggccaaggtggtgttgacaaacccagaagctgccaaatatgttcatggcatcgctgtccactggtacctggattttttggcccctcccaagtggactctgggagagacccacagactcttccccaataccacactgtttgcatcagaagcctgcgtggggagcaaattctgggagcagtctgttaggctgggttcctgggatcggggcatgcaatattcccatagtataataactaacctcctctaccacgtggtaggatggacagactggaatctggctttgaacccagaaggaggccccaattgggtgcgcaactttgttgacagccccatcattgtggatatcacaaaggacaccttctacaaacagcctatgttctatcatctggggcactttagcaagttcattccagagggttcccagagagtaggcttggttgcctcacagaagaatgatctggatgctgtggcactcctgcatcctgacgggagtgcagtggtggtagtactgaacaggtctagcaaagatgttcccttgactatcaaagaccctgctgtgggctttctggaaaccatttcccctggatactctatccacacctatctctggagaagacagtaatga

SEQ ID NO: 936 - protein, 536 aa, synthetic construct
  REGION 1..536: note = Variant of B-Glucocerebrosidase
MEFSSPSREECPKPLSRVSIMAGSLTGLLLLQAVSWASGARPCIPKSFGYSSVVCVCNATYCDSVDPLTLPALGTFSRYESTRSGRRMELSMGPIQANRTGTGLLLTLQPEQKFQKVKGFGGAMTDAAALNILALSPPAQNLLLKSYFSEEGIEYNIIRVPMASCDFSIRTYTYADTPDDFQLHNFSLPEEDTKLKIPLIHRALQLSQRPVSLFASPWTSPTWLKTNGALNGAGSLKGQPGDIYHQTWARYFVKFLDAYAEHGLQFWAVTAENEPSAGLLSGYPFQCLGFTPEHQRDFIARDLGPTLANSTHHNVRLLILDDQRLLLPHWAKVVLTNPEAAKYVHGIAVHWYLDFLAPPKWTLGETHRLFPNTTLFASEACVGSKFWEQSVRLGSWDRGMQYSHSIITNLLYHVVGWTDWNLALNPEGGPNWVRNFVDSPIIVDITKDTFYKQPMFYHLGHFSKFIPEGSQRVGLVASQKNDLDAVALLHPDGSAVVVVLNRSSKDVPLTIKDPAVGFLETISPGYSIHTYLWRRQ

SEQ ID NO: 937 - DNA, 1614 bp, synthetic construct
  misc_feature 1..1614: note = Variant of B-Glucocerebrosidase
  source 1..1614: mol_type = other DNA
atggagttttcttctcctagtagagaagaatgccccaagccactgagcagggtgagcatcatggctggatccctcacagggctgcttcttttgcaggcagtctcatgggcctctggagccaggccctgtattcccaagtcattcggctactcctcagtggtgtgtgtatgcaatgccacctattgtgacagtctcgatcctctcactctccctgctctgggtaccttctcccgggttgagagcacaagaagtggaagacgcatggagctctcaatgggccctatacaggctaaccgcactgggacaggtctgctgctgaccctccaacctgaacagaagtttcagaaagtcaagggatttggaggagccatgactgatgcagcagcactcaacatcttggccctgtctccaccagcccagaacctgctgttgaagtcctacttctcagaggaggggattgagtacaacatcatccgggttcccatggctagctgtgacttctccattaggacctatacatacgctgacacccccgatgattttcagctccataatttcagtctccctgaagaagacaccaaactgaagatacctctgattcacagagccttgcaactgtcccaaaggccagtgagcctcttcgcttctccctggactagtcctacatggctgaagactaatggtgctctgaatgggaaaggctccctgaaaggacagccaggtgacatatatcatcagacatgggcccgctactttgtgaaattccttgatgcctatgcagagcacaagctccaattctgggcagtcaccgcagaaaacgagccctcagctgggctgctgtctggctacccctttcagtgcttgggctttactcctgagcatcaacgggacttcattgcccgggatttggggccaacactggccaacagcacccaccacaatgtaagactcctcattctggatgaccagaggctgctgctccctcattgggccaaggtggtgttgacagacccagaagctgccaaatatgttcatggcatcgctgtccactggtacctggattttttggcccctgcaaaggctactctgggagagacccacagactcttccccaataccatgctgtttgcatcagaagcctgcgtggggagcaaattctgggagcagtctgttaggctgggttcctgggatcggggcatgcaatattcccatagtataataactaacctcctctaccacgtggtaggatggacagactggaatctggctttgaacccagaaggaggccccaattgggtgcgcaactttgttgacagccccatcattgtggatatcacaaaggacaccttctacaaacagcctatgttctatcatctggggcactttagcaagttcattccagagggttcccagagagtaggcttggttgcctcacagaagaatgatctggatgctgtggcactcctgcatcctgacgggagtgcagtggtggtagtactgaacaggtctagcaaagatgttcccttgactatcaaagacccagctgtgggctttctggaaaccatttcccctggatactctatccacacctatctctggagaagagattaatga

SEQ ID NO: 938 - protein, 536 aa, synthetic construct
  REGION 1..536: note = Variant of B-Glucocerebrosidase
MEFSSPSREECPKPLSRVSIMAGSLTGLLLLQAVSWASGARPCIPKSFGYSSVVCVCNATYCDSLDPLTLPALGTFSRVESTRSGRRMELSMGPIQANRTGTGLLLTLQPEQKFQKVKGFGGAMTDAAALNILALSPPAQNLLLKSYFSEEGIEYNIIRVPMASCDFSIRTYTYADTPDDFQLHNFSLPEEDTKLKIPLIHRALQLSQRPVSLFASPWTSPTWLKTNGALNGKGSLKGQPGDIYHQTWARYFVKFLDAYAEHKLQFWAVTAENEPSAGLLSGYPFQCLGFTPEHQRDFIARDLGPTLANSTHHNVRLLILDDQRLLLPHWAKVVLTDPEAAKYVHGIAVHWYLDFLAPAKATLGETHRLFPNTMLFASEACVGSKFWEQSVRLGSWDRGMQYSHSIITNLLYHVVGWTDWNLALNPEGGPNWVRNFVDSPIIVDITKDTFYKQPMFYHLGHFSKFIPEGSQRVGLVASQKNDLDAVALLHPDGSAVVVVLNRSSKDVPLTIKDPAVGFLETISPGYSIHTYLWRRD

SEQ ID NO: 939 - DNA, 1614 bp, synthetic construct
  misc_feature 1..1614: note = Variant of B-Glucocerebrosidase
  source 1..1614: mol_type = other DNA
atggagttttcttctcctagtagagaagaatgccccaagccactgagcagggtgagcatcatggctggatccctcacagggctgcttcttttgcaggcagtctcatgggcctctggagccaggccctgtattcccaagtcattcggctactcctcagtggtgtgtgtatgcaatgccacctattgtgacagtctcgatcctctcactctccctgctctgggtaccttctcccgggttgagagcacaagaagtggaagacgcatggagctctcaatgggccctatacaggctaaccgcactgggacaggtctgctgctgaccctccaacctgaacagaagtttcagaaagtcaagggatttggaggagccatgactgatgcagcagcactcaacatcttggccctgtctccaccagcccagaacctgctgttgaagtcctacttctcagaggaggggattgagtacaacatcatccgggttcccatggctagctgtgacttctccattaggacctatacatacgctgacacccccgatgattttcagctccataatttcagtctccctgaagaagacaccaaactgaagatacctctgattcacagagccttgcaactgtcccaaaggccagtgagcctcttcgcttctccctggactagtcctacatggctgaagactaatggtgcttacaatggggcaggctccctgaaaggacggccaggtgacatatatcatcagacatgggcccgctactttgtgaaattccttgatgcctatgcagagcacaaactccaattctgggcagtcaccgcagaaaacgagccctcagctgggctgctgtctggctacccctttcagtgcttgggctttactcctgagcatcaacgggacttcattgcccgggatttggggccaacactggccaacagcacccaccacaatgtaagactcctcattctggatgaccagaggctgctgctccctcattgggccaaggtggtgttgacagacccagaagctgccaaatatgttcatggcatcgctgtccactggtacctggattttttggcccctcccaagtggactctgggagagacccacagactcttccccaataccatgctgtttgcatcagaagcctgcgtggggagcaaattctgggagcagtctgttaggctgggttcctgggatcggggcatgcaatattcccatagtataataactaacctcctctaccacgtggtaggatggacagactggaatctggctttgaacccagaaggaggccccaattgggtgcgcaactttgttgacagccccatcattgtggatatcacaaaggacaccttctacaaacagcctatgttctatcatctggggcactttagcaagttcattccagagggttccactagagtaggcttggttgcctcacagaagaatgatctggatgctgtggcactcctgcatcctgacgggagtgcagtggtggtagtactgaacaggtctagcaaagatgttcccttgactatcaaagacccagctgtgggctttctggaaaccatttcccctggatactctatccacacctatctctggagaagacagtaatga

SEQ ID NO: 940 - protein, 536 aa, synthetic construct
  REGION 1..536: note = Variant of B-Glucocerebrosidase
MEFSSPSREECPKPLSRVSIMAGSLTGLLLLQAVSWASGARPCIPKSFGYSSVVCVCNATYCDSLDPLTLPALGTFSRVESTRSGRRMELSMGPIQANRTGTGLLLTLQPEQKFQKVKGFGGAMTDAAALNILALSPPAQNLLLKSYFSEEGIEYNIIRVPMASCDFSIRTYTYADTPDDFQLHNFSLPEEDTKLKIPLIHRALQLSQRPVSLFASPWTSPTWLKTNGAYNGAGSLKGRPGDIYHQTWARYFVKFLDAYAEHKLQFWAVTAENEPSAGLLSGYPFQCLGFTPEHQRDFIARDLGPTLANSTHHNVRLLILDDQRLLLPHWAKVVLTDPEAAKYVHGIAVHWYLDFLAPPKWTLGETHRLFPNTMLFASEACVGSKFWEQSVRLGSWDRGMQYSHSIITNLLYHVVGWTDWNLALNPEGGPNWVRNFVDSPIIVDITKDTFYKQPMFYHLGHFSKFIPEGSTRVGLVASQKNDLDAVALLHPDGSAVVVVLNRSSKDVPLTIKDPAVGFLETISPGYSIHTYLWRRQ

SEQ ID NO: 941 - DNA, 1614 bp, synthetic construct
  misc_feature 1..1614: note = Variant of B-Glucocerebrosidase
  source 1..1614: mol_type = other DNA
atggagttttcttctcctagtagagaagaatgccccaagccactgagcagggtgagcatcatggctggatccctcacagggctgcttcttttgcaggcagtctcatgggcctctggagccaggccctgtattcccaagtcattcggctactcctcagtggtgtgtgtatgcaatgccacctattgtgacagtgtcgatcctctcactctccctgctctgggtaccttctcccggtatgagagcacaagaagtggaagacgcatggagctctcaatgggccctatacaggctaaccgcactgggacaggtctgctgctgaccctccaacctgaacagaagtttcagaaagtcaagggatttggaggagccatgactgatgcagcagcactcaacatcttggccctgtctccaccagcccagaacctgctgttgaagtcctacttctcagaggaggggattgagtacaacatcatccgggttcccatggctagctgtgacttctccattaggacctatacatacgctgacacccccgatgattttcagctccataatttcagtctccctgaagaagacaccaaactgaagatacctctgattcacagagccttgcaactgtcccaaaggccagtgagcctcttcgcttctccctggactagtcctacatggctgaagactaatggtgctctcaatgggaagggctccctgaaaggacagccaggtgacatatatcatcagacatgggcccgctactttgtgaaattccttgatgcctatgcagagcacaagctccaattctgggcagtcaccgcagaaaacgagccctcagctgggctgctgtctggctacccctttcagtgcttgggctttactcctgagcatcaacgggacttcattgcccgggatttggggccaacactggccaacagcacccaccacaatgtaagactcctcattctggatgaccagaggctgctgctccctcattgggccaaggtggtgttgacagacccagaagctgccaaatatgttcatggcatcgctgtccactggtacctggattttttggcccctgcaaaggctactctgggagagacccacagactcttccccaataccatgctgtttgcatcagaagcctgcgtggggagcaaattctgggagcagtctgttaggctgggttcctgggatcggggcatgcaatattcccatagtataataactaacctcctctaccacgtggtaggatggacagactggaatctggctttgaacccagaaggaggccccaattgggtgcgcaactttgttgacagccccatcattgtggatatcacaaaggacaccttctacaaacagcctatgttctatcatctggggcactttagcaagttcattccagagggttccactagagtaggcttggttgcctcacagaagaatgatctggatgctgtggcactcctgcatcctgacgggagtgcagtggtggtagtactgaacaggtctagcaaagatgttcccttgactatcaaagacccagctgtgggctttctggaaaccatttcccctggatactctatccacacctatctctggagaagacagtaatga

SEQ ID NO: 942 - protein, 536 aa, synthetic construct
  REGION 1..536: note = Variant of B-Glucocerebrosidase
MEFSSPSREECPKPLSRVSIMAGSLTGLLLLQAVSWASGARPCIPKSFGYSSVVCVCNATYCDSVDPLTLPALGTFSRYESTRSGRRMELSMGPIQANRTGTGLLLTLQPEQKFQKVKGFGGAMTDAAALNILALSPPAQNLLLKSYFSEEGIEYNIIRVPMASCDFSIRTYTYADTPDDFQLHNFSLPEEDTKLKIPLIHRALQLSQRPVSLFASPWTSPTWLKTNGALNGKGSLKGQPGDIYHQTWARYFVKFLDAYAEHKLQFWAVTAENEPSAGLLSGYPFQCLGFTPEHQRDFIARDLGPTLANSTHHNVRLLILDDQRLLLPHWAKVVLTDPEAAKYVHGIAVHWYLDFLAPAKATLGETHRLFPNTMLFASEACVGSKFWEQSVRLGSWDRGMQYSHSIITNLLYHVVGWTDWNLALNPEGGPNWVRNFVDSPIIVDITKDTFYKQPMFYHLGHFSKFIPEGSTRVGLVASQKNDLDAVALLHPDGSAVVVVLNRSSKDVPLTIKDPAVGFLETISPGYSIHTYLWRRQ

SEQ ID NO: 943 - DNA, 1614 bp, synthetic construct
  misc_feature 1..1614: note = Variant of B-Glucocerebrosidase
  source 1..1614: mol_type = other DNA
atggagttttcttctcctagtagagaagaatgccccaagccactgagcagggtgagcatcatggctggatccctcacagggctgcttcttttgcaggcagtctcatgggcctctggagccaggccctgtattcccaagtcattcggctactcctcagtggtgtgtgtatgcaatgccacctattgtgacagtctcgatcctctcactctccctgctctgggtaccttctcccggtatgagagcacaagaagtggaagacgcatggagctctcaatgggccctatacaggctaaccgcactgggacaggtctgctgctgaccctccaacctgaacagaagtttcagaaagtcaagggatttggaggagccatgactgatgcagcagcactcaacatcttggccctgtctccaccagcccagaacctgctgttgaagtcctacttctcagaggaggggattgagtacaacatcatccgggttcccatggctagctgtgacttctccattaggacctatacatacgctgacacccccgatgattttcagctccataatttcagtctccctgaagaagacaccaaactgaagatacctctgattcacagagccttgcaactgtcccaaaggccagtgagcctcttcgcttctccctggactagtcctacatggctgaagactaatggtgctctgaatgggaaaggctccctgaaaggacagccaggtgacatatatcatcagacatgggcccgctactttgtgaaattccttgatgcctatgcagagcacaagctccaattctgggcagtcaccgcagaaaacgagccctcagctgggctgctgtctggctacccctttcagtgcttgggctttactcctgagcatcaacgggacttcattgcccgggatttggggccaacactggccaacagcacccaccacaatgtaagactcctcattctggatgaccagaggctgctgctccctcattgggccaaggtggtgttgacagacccagaagctgccaaatatgttcatggcatcgctgtccactggtacctggattttttggcccctgcaaaggctactctgggagagacccacagactcttccccaataccacactgtttgcatcagaagcctgcgtggggagcaaattctgggagcagtctgttaggctgggttcctgggatcggggcatgcaatattcccatagtataataactaacctcctctaccacgtggtaggatggacagactggaatctggctttgaacccagaaggaggccccaattgggtgcgcaactttgttgacagccccatcattgtggatatcacaaaggacaccttctacaaacagcctatgttctatcatctggggcactttagcaagttcattccagagggttcccagagagtaggcttggttgcctcacagaagaatgatctggatgctgtggcactcctgcatcctgacgggagtgcagtggtggtagtactgaacaggtctagcaaagatgttcccttgactatcaaagacccagctgtgggctttctggaaaccatttcccctggatactctatccacacctatctctggagaagacagtaatga

SEQ ID NO: 944 - protein, 536 aa, synthetic construct
  REGION 1..536: note = Variant of B-Glucocerebrosidase
MEFSSPSREECPKPLSRVSIMAGSLTGLLLLQAVSWASGARPCIPKSFGYSSVVCVCNATYCDSLDPLTLPALGTFSRYESTRSGRRMELSMGPIQANRTGTGLLLTLQPEQKFQKVKGFGGAMTDAAALNILALSPPAQNLLLKSYFSEEGIEYNIIRVPMASCDFSIRTYTYADTPDDFQLHNFSLPEEDTKLKIPLIHRALQLSQRPVSLFASPWTSPTWLKTNGALNGKGSLKGQPGDIYHQTWARYFVKFLDAYAEHKLQFWAVTAENEPSAGLLSGYPFQCLGFTPEHQRDFIARDLGPTLANSTHHNVRLLILDDQRLLLPHWAKVVLTDPEAAKYVHGIAVHWYLDFLAPAKATLGETHRLFPNTTLFASEACVGSKFWEQSVRLGSWDRGMQYSHSIITNLLYHVVGWTDWNLALNPEGGPNWVRNFVDSPIIVDITKDTFYKQPMFYHLGHFSKFIPEGSQRVGLVASQKNDLDAVALLHPDGSAVVVVLNRSSKDVPLTIKDPAVGFLETISPGYSIHTYLWRRQ

SEQ ID NO: 945 - DNA, 1614 bp, synthetic construct
  misc_feature 1..1614: note = Variant of B-Glucocerebrosidase
  source 1..1614: mol_type = other DNA
atggagttttcttctcctagtagagaagaatgccccaagccactgagcagggtgagcatcatggctggatccctcacagggctgcttcttttgcaggcagtctcatgggcctctggagccaggccctgtattcccaagtcattcggctactcctcagtggtgtgtgtatgcaatgccacctattgtgacagtgtcgatcctctcactctccctgctctgggtaccttctcccggtatgagagcacaagaagtggaagacgcatggagctctcaatgggccctatacaggctaaccgcactgggacaggtctgctgctgaccctccaacctgaacagaagtttcagaaagtcaagggatttggaggagccatgactgatgcagcagcactcaacatcttggccctgtctccaccagcccagaacctgctgttgaagtcctacttctcagaggaggggattgagtacaacatcatccgggttcccatggctagctgtgacttctccattaggacctatacatacgctgacacccccgatgattttcagctccataatttcagtctccctgaagaagacaccaaatggaagatacctctgattcacagagccttgcaactgtcccaaaggccagtgagcctcttcgcttctccctggactagtcctacatggctgaagactaatggtgcttacaatggggcaggctccctgaaaggacagccaggtgacatatatcatcagacatgggcccgctactttgtgaaattccttgatgcctatgcagagcacaagctccaattctgggcagtcaccgcagaaaacgagccctcagctgggctgctgtctggctacccctttcagtgcttgggctttactcctgagcatcaacgggacttcattgcccgggatttggggccaacactggccaacagcacccaccacaatgtaagactcctcattctggatgaccagaggctgctgctccctcattgggccaaggtggtgttgacaaacccagaagctgccaaatatgttcatggcatcgctgtccactggtacctggattttttggcccctgcaaaggctactctgggagagacccacagactcttccccaataccacactgtttgcatcagaagcctgcgtggggagcaaattctgggagcagtctgttaggctgggttcctgggatcggggcatgcaatattcccatagtataataactaacctcctctaccacgtggtaggatggacagactggaatctggctttgaacccagaaggaggccccaattgggtgcgcaactttgttgacagccccatcattgtggatatcacaaaggacaccttctacaaacagcctatgttctatcatctggggcactttagcaagttcattccagagggttcccagagagtaggcttggttgcctcacagaagaatgatctggatgctgtggcactcctgcatcctgacgggagtgcagtggtggtagtactgaacaggtctagcaaagatgttcccttgactatcaaagacgaggctgtgggctttctggaaaccatttcccctggatactctatccacacctatctctggagaagacagtaatga

SEQ ID NO: 946 - protein, 536 aa, synthetic construct
  REGION 1..536: note = Variant of B-Glucocerebrosidase
MEFSSPSREECPKPLSRVSIMAGSLTGLLLLQAVSWASGARPCIPKSFGYSSVVCVCNATYCDSVDPLTLPALGTFSRYESTRSGRRMELSMGPIQANRTGTGLLLTLQPEQKFQKVKGFGGAMTDAAALNILALSPPAQNLLLKSYFSEEGIEYNIIRVPMASCDFSIRTYTYADTPDDFQLHNFSLPEEDTKWKIPLIHRALQLSQRPVSLFASPWTSPTWLKTNGAYNGAGSLKGQPGDIYHQTWARYFVKFLDAYAEHKLQFWAVTAENEPSAGLLSGYPFQCLGFTPEHQRDFIARDLGPTLANSTHHNVRLLILDDQRLLLPHWAKVVLTNPEAAKYVHGIAVHWYLDFLAPAKATLGETHRLFPNTTLFASEACVGSKFWEQSVRLGSWDRGMQYSHSIITNLLYHVVGWTDWNLALNPEGGPNWVRNFVDSPIIVDITKDTFYKQPMFYHLGHFSKFIPEGSQRVGLVASQKNDLDAVALLHPDGSAVVVVLNRSSKDVPLTIKDEAVGFLETISPGYSIHTYLWRRQ

SEQ ID NO: 947 - DNA, 1614 bp, synthetic construct
  misc_feature 1..1614: note = Variant of B-Glucocerebrosidase
  source 1..1614: mol_type = other DNA
atggagttttcttctcctagtagagaagaatgccccaagccactgagcagggtgagcatcatggctggatccctcacagggctgcttcttttgcaggcagtctcatgggcctctggagccaggccctgtattcccaagtcattcggctactcctcagtggtgtgtgtatgcaatgccacctattgtgacagtgtcgatcctctcactctccctgctctgggtaccttctcccggtatgagagcacaagaagtggaagacgcatggagctctcaatgggccctatacaggctaaccgcactgggacaggtctgctgctgaccctccaacctgaacagaagtttcagaaagtcaagggatttggaggagccatgactgatgcagcagcactcaacatcttggccctgtctccaccagcccagaacctgctgttgaagtcctacttctcagaggaggggattgagtacaacatcatccgggttcccatggctagctgtgacttctccattaggacctatacatacgctgacacccccgatgattttcagctccataatttcagtctccctgaagaagacaccaaatggaagatacctctgattcacagagccttgcaactgtcccaaaggccagtgagcctcttcgcttctccctggactagtcctacatggctgaagactaatggtgctctcaatggggcaggctccctgaaaggacagccaggtgacatatatcatcagacatgggcccgctactttgtgaaattccttgatgcctatgcagagcacaaactccaattctgggcagtcaccgcagaaaacgagccctcagctgggctgctgtctggctacccctttcagtgcttgggctttactcctgagcatcaacgggacttcattgcccgggatttggggccaacactggccaacagcacccaccacaatgtaagactcctcattctggatgaccagaggctgctgctccctcattgggccaaggtggtgttgacagacccagaagctgccaaatatgttcatggcatcgctgtccactggtacctggattttttggcccctcccaaggccactctgggagagacccacagactcttccccaataccatgctgtttgcatcagaagcctgcgtggggagcaaattctgggagcagtctgttaggctgggttcctgggatcggggcatgcaatattcccatagtataataactaacctcctctaccacgtggtaggatggacagactggaatctggctttgaacccagaaggaggccccaattgggtgcgcaactttgttgacagccccatcattgtggatatcacaaaggacaccttctacaaacagcctatgttctatcatctggggcactttagcaagttcattccagagggttcccagagagtaggcttggttgcctcacagaagaatgatctggatgctgtggcactcctgcatcctgacgggagtgcagtggtggtagtactgaacaggtctagcaaagatgttcccttgactatcaaagaccctgctgtgggctttctggaaaccatttcccctggatactctatccacacctatctctggagaagagattaatga

SEQ ID NO: 948 - protein, 536 aa, synthetic construct
  REGION 1..536: note = Variant of B-Glucocerebrosidase
MEFSSPSREECPKPLSRVSIMAGSLTGLLLLQAVSWASGARPCIPKSFGYSSVVCVCNATYCDSVDPLTLPALGTFSRYESTRSGRRMELSMGPIQANRTGTGLLLTLQPEQKFQKVKGFGGAMTDAAALNILALSPPAQNLLLKSYFSEEGIEYNIIRVPMASCDFSIRTYTYADTPDDFQLHNFSLPEEDTKWKIPLIHRALQLSQRPVSLFASPWTSPTWLKTNGALNGAGSLKGQPGDIYHQTWARYFVKFLDAYAEHKLQFWAVTAENEPSAGLLSGYPFQCLGFTPEHQRDFIARDLGPTLANSTHHNVRLLILDDQRLLLPHWAKVVLTDPEAAKYVHGIAVHWYLDFLAPPKATLGETHRLFPNTMLFASEACVGSKFWEQSVRLGSWDRGMQYSHSIITNLLYHVVGWTDWNLALNPEGGPNWVRNFVDSPIIVDITKDTFYKQPMFYHLGHFSKFIPEGSQRVGLVASQKNDLDAVALLHPDGSAVVVVLNRSSKDVPLTIKDPAVGFLETISPGYSIHTYLWRRD

SEQ ID NO: 949 - DNA, 1614 bp, synthetic construct
  misc_feature 1..1614: note = Variant of B-Glucocerebrosidase
  source 1..1614: mol_type = other DNA
atggagttttcttctcctagtagagaagaatgccccaagccactgagcagggtgagcatcatggctggatccctcacagggctgcttcttttgcaggcagtctcatgggcctctggagccaggccctgtattcccaagtcattcggctactcctcagtggtgtgtgtatgcaatgccacctattgtgacagtctcgatcctctcactctccctgctctgggtaccttctcccggtatgagagcacaagaagtggaagacgcatggagctctcaatgggccctatacaggctaaccgcactgggacaggtctgctgctgaccctccaacctgaacagaagtttcagaaagtcaagggatttggaggagccatgactgatgcagcagcactcaacatcttggccctgtctccaccagcccagaacctgctgttgaagtcctacttctcagaggaggggattgagtacaacatcatccgggttcccatggctagctgtgacttctccattaggacctatacatacgctgacacccccgatgattttcagctccataatttcagtctccctgaagaagacaccaaactgaagatacctctgattcacagagccttgcaactgtcccaaaggccagtgagcctcttcgcttctccctggactagtcctacatggctgaagactaatggtgcttacaatgggaagggctccctgaaaggacagccaggtgacatatatcatcagacatgggcccgctactttgtgaaattccttgatgcctatgcagagcacaagctccaattctgggcagtcaccgcagaaaacgagccctcagctgggctgctgtctggctacccctttcagtgcttgggctttactcctgagcatcaacgggacttcattgcccgggatttggggccaacactggccaacagcacccaccacaatgtaagactcctcattctggatgaccagaggctgctgctccctcattgggccaaggtggtgttgacagacccagaagctgccaaatatgttcatggcatcgctgtccactggtacctggattttttggcccctgcaaaggctactctgggagagacccacagactcttccccaataccatgctgtttgcatcagaagcctgcgtggggagcaaattctgggagcagtctgttaggctgggttcctgggatcggggcatgcaatattcccatagtataataactaacctcctctaccacgtggtaggatggacagactggaatctggctttgaacccagaaggaggccccaattgggtgcgcaactttgttgacagccccatcattgtggatatcacaaaggacaccttctacaaacagcctatgttctatcatctggggcactttagcaagttcattccagagggttcccagagagtaggcttggttgcctcacagaagaatgatctggatgctgtggcactcctgcatcctgacgggagtgcagtggtggtagtactgaacaggtctagcaaagatgttcccttgactatcaaagacccagctgtgggctttctggaaaccatttcccctggatactctatccacacctatctctggagaagacagtaatga

SEQ ID NO: 950 - protein, 536 aa, synthetic construct
  REGION 1..536: note = Variant of B-Glucocerebrosidase
MEFSSPSREECPKPLSRVSIMAGSLTGLLLLQAVSWASGARPCIPKSFGYSSVVCVCNATYCDSLDPLTLPALGTFSRYESTRSGRRMELSMGPIQANRTGTGLLLTLQPEQKFQKVKGFGGAMTDAAALNILALSPPAQNLLLKSYFSEEGIEYNIIRVPMASCDFSIRTYTYADTPDDFQLHNFSLPEEDTKLKIPLIHRALQLSQRPVSLFASPWTSPTWLKTNGAYNGKGSLKGQPGDIYHQTWARYFVKFLDAYAEHKLQFWAVTAENEPSAGLLSGYPFQCLGFTPEHQRDFIARDLGPTLANSTHHNVRLLILDDQRLLLPHWAKVVLTDPEAAKYVHGIAVHWYLDFLAPAKATLGETHRLFPNTMLFASEACVGSKFWEQSVRLGSWDRGMQYSHSIITNLLYHVVGWTDWNLALNPEGGPNWVRNFVDSPIIVDITKDTFYKQPMFYHLGHFSKFIPEGSQRVGLVASQKNDLDAVALLHPDGSAVVVVLNRSSKDVPLTIKDPAVGFLETISPGYSIHTYLWRRQ

SEQ ID NO: 951 - DNA, 1614 bp, synthetic construct
  misc_feature 1..1614: note = Variant of B-Glucocerebrosidase
  source 1..1614: mol_type = other DNA
atggagttttcttctcctagtagagaagaatgccccaagccactgagcagggtgagcatcatggctggatccctcacagggctgcttcttttgcaggcagtctcatgggcctctggagccaggccctgtattcccaagtcattcggctactcctcagtggtgtgtgtatgcaatgccacctattgtgacagtgtcgatcctctcactctccctgctctgggtaccttctcccggtatgagagcacaagaagtggaagacgcatggagctctcaatgggccctatacaggctaaccgcactgggacaggtctgctgctgaccctccaacctgaacagaagtttcagaaagtcaagggatttggaggagccatgactgatgcagcagcactcaacatcttggccctgtctccaccagcccagaacctgctgttgaagtcctacttctcagaggaggggattgagtacaacatcatccgggttcccatggctagctgtgacttctccattaggacctatacatacgctgacacccccgatgattttcagctccataatttcagtctccctgaagaagacaccaaatggaagatacctctgattcacagagccttgcaactgtcccaaaggccagtgagcctcttcgcttctccctggactagtcctacatggctgaagactaatggtgctctgaatgggaaaggctccctgaaaggacagccaggtgacatatatcatcagacatgggcccgctactttgtgaaattccttgatgcctatgcagagcacgggctccaattctgggcagtcaccgcagaaaacgagcccacagctgggctgctgtctggctacccctttcagtgcttgggctttactcctgagcatcaacgggacttcattgcccgggatttggggccaacactggccaacagcacccaccacaatgtaagactcctcattctggatgaccagaggctgctgctccctcattgggccaaggtggtgttgacagacccagaagctgccaaatatgttcatggcatcgctgtccactggtacctggattttttggcccctcccaagtggactctgggagagacccacagactcttccccaataccacactgtttgcatcagaagcctgcgtggggagcaaattctgggagcagtctgttaggctgggttcctgggatcggggcatgcaatattcccatagtataataactaacctcctctaccacgtggtaggatggacagactggaatctggctttgaacccagaaggaggccccaattgggtgcgcaactttgttgacagccccatcattgtggatatcacaaaggacaccttctacaaacagcctatgttctatcatctggggcactttagcaagttcattccagagggttccactagagtaggcttggttgcctcacagaagaatgatctggatgctgtggcactcctgcatcctgacgggagtgcagtggtggtagtactgaacaggtctagcaaagatgttcccttgactatcaaagacccagctgtgggctttctggaaaccatttcccctggatactctatccacacctatctctggagaagacagtaatga

SEQ ID NO: 952 - protein, 536 aa, synthetic construct
  REGION 1..536: note = Variant of B-Glucocerebrosidase
MEFSSPSREECPKPLSRVSIMAGSLTGLLLLQAVSWASGARPCIPKSFGYSSVVCVCNATYCDSVDPLTLPALGTFSRYESTRSGRRMELSMGPIQANRTGTGLLLTLQPEQKFQKVKGFGGAMTDAAALNILALSPPAQNLLLKSYFSEEGIEYNIIRVPMASCDFSIRTYTYADTPDDFQLHNFSLPEEDTKWKIPLIHRALQLSQRPVSLFASPWTSPTWLKTNGALNGKGSLKGQPGDIYHQTWARYFVKFLDAYAEHGLQFWAVTAENEPTAGLLSGYPFQCLGFTPEHQRDFIARDLGPTLANSTHHNVRLLILDDQRLLLPHWAKVVLTDPEAAKYVHGIAVHWYLDFLAPPKWTLGETHRLFPNTTLFASEACVGSKFWEQSVRLGSWDRGMQYSHSIITNLLYHVVGWTDWNLALNPEGGPNWVRNFVDSPIIVDITKDTFYKQPMFYHLGHFSKFIPEGSTRVGLVASQKNDLDAVALLHPDGSAVVVVLNRSSKDVPLTIKDPAVGFLETISPGYSIHTYLWRRQ

SEQ ID NO: 953 - DNA, 1614 bp, synthetic construct
  misc_feature 1..1614: note = Variant of B-Glucocerebrosidase
  source 1..1614: mol_type = other DNA
atggagttttcttctcctagtagagaagaatgccccaagccactgagcagggtgagcatcatggctggatccctcacagggctgcttcttttgcaggcagtctcatgggcctctggagccaggccctgtattcccaagtcattcggctactcctcagtggtgtgtgtatgcaatgccacctattgtgacagtctcgatcctctcactctccctgctctgggtaccttctcccgggttgagagcacaagaagtggaagacgcatggagctctcaatgggccctatacaggctaaccgcactgggacaggtctgctgctgaccctccaacctgaacagaagtttcagaaagtcaagggatttggaggagccatgactgatgcagcagcactcaacatcttggccctgtctccaccagcccagaacctgctgttgaagtcctacttctcagaggaggggattgagtacaacatcatccgggttcccatggctagctgtgacttctccattaggacctatacatacgctgacacccccgatgattttcagctccataatttcagtctccctgaagaagacaccaaactgaagatacctctgattcacagagccttgcaactgtcccaaaggccagtgagcctcttcgcttctccctggactagtcctacatggctgaagactaatggtgctctcaatgggaagggctccctgaaaggacagccaggtgacatatatcatcagacatgggcccgctactttgtgaaattccttgatgcctatgcagagcacaaactccaattctgggcagtcaccgcagaaaacgagccctcagctgggctgctgtctggctacccctttcagtgcttgggctttactcctgagcatcaacgggacttcattgcccgggatttggggccaacactggccaacagcacccaccacaatgtaagactcctcattctggatgaccagaggctgctgctccctcattgggccaaggtggtgttgacagacccagaagctgccaaatatgttcatggcatcgctgtccactggtacctggattttttggcccctgcaaaggctactctgggagagacccacagactcttccccaataccatgctgtttgcatcagaagcctgcgtggggagcaaattctgggagcagtctgttaggctgggttcctgggatcggggcatgcaatattcccatagtataataactaacctcctctaccacgtggtaggatggacagactggaatctggctttgaacccagaaggaggccccaattgggtgcgcaactttgttgacagccccatcattgtggatatcacaaaggacaccttctacaaacagcctatgttctatcatctggggcactttagcaagttcattccagagggttcccagagagtaggcttggttgcctcacagaagaatgatctggatgctgtggcactcctgcatcctgacgggagtgcagtggtggtagtactgaacaggtctagcaaagatgttcccttgactatcaaagaccctgctgtgggctttctggaaaccatttcccctggatactctatccacacctatctctggagaagacagtaatga

SEQ ID NO: 954 - protein, 536 aa, synthetic construct
  REGION 1..536: note = Variant of B-Glucocerebrosidase
MEFSSPSREECPKPLSRVSIMAGSLTGLLLLQAVSWASGARPCIPKSFGYSSVVCVCNATYCDSLDPLTLPALGTFSRVESTRSGRRMELSMGPIQANRTGTGLLLTLQPEQKFQKVKGFGGAMTDAAALNILALSPPAQNLLLKSYFSEEGIEYNIIRVPMASCDFSIRTYTYADTPDDFQLHNFSLPEEDTKLKIPLIHRALQLSQRPVSLFASPWTSPTWLKTNGALNGKGSLKGQPGDIYHQTWARYFVKFLDAYAEHKLQFWAVTAENEPSAGLLSGYPFQCLGFTPEHQRDFIARDLGPTLANSTHHNVRLLILDDQRLLLPHWAKVVLTDPEAAKYVHGIAVHWYLDFLAPAKATLGETHRLFPNTMLFASEACVGSKFWEQSVRLGSWDRGMQYSHSIITNLLYHVVGWTDWNLALNPEGGPNWVRNFVDSPIIVDITKDTFYKQPMFYHLGHFSKFIPEGSQRVGLVASQKNDLDAVALLHPDGSAVVVVLNRSSKDVPLTIKDPAVGFLETISPGYSIHTYLWRRQ

SEQ ID NO: 955 - DNA, 1614 bp, synthetic construct
  misc_feature 1..1614: note = Variant of B-Glucocerebrosidase
  source 1..1614: mol_type = other DNA
atggagttttcttctcctagtagagaagaatgccccaagccactgagcagggtgagcatcatggctggatccctcacagggctgcttcttttgcaggcagtctcatgggcctctggagccaggccctgtattcccaagtcattcggctactcctcagtggtgtgtgtatgcaatgccacctattgtgacagtctcgatcctctcactctccctgctctgggtaccttctcccggtatgagagcacaagaagtggaagacgcatggagctctcaatgggccctatacaggctaaccgcactgggacaggtctgctgctgaccctccaacctgaacagaagtttcagaaagtcaagggatttggaggagccatgactgatgcagcagcactcaacatcttggccctgtctccaccagcccagaacctgctgttgaagtcctacttctcagaggaggggattgagtacaacatcatccgggttcccatggctagctgtgacttctccattaggacctatacatacgctgacacccccgatgattttcagctccataatttcagtctccctgaagaagacaccaaatggaagatacctctgattcacagagccttgcaactgtcccaaaggccagtgagcctcttcgcttctccctggactagtcctacatggctgaagactaatggtgcttacaatggggcaggctccctgaaaggacagccaggtgacatatatcatcagacatgggcccgctactttgtgaaattccttgatgcctatgcagagcacaaactccaattctgggcagtcaccgcagaaaacgagccctcagctgggctgctgtctggctacccctttcagtgcttgggctttactcctgagcatcaacgggacttcattgcccgggatttggggccaacactggccaacagcacccaccacaatgtaagactcctcattctggatgaccagaggctgctgctccctcattgggccaaggtggtgttgacaaacccagaagctgccaaatatgttcatggcatcgctgtccactggtacctggattttttggcccctgccaaggccactctgggagagacccacagactcttccccaataccacactgtttgcatcagaagcctgcgtggggagcaaattctgggagcagtctgttaggctgggttcctgggatcggggcatgcaatattcccatagtataataactaacctcctctaccacgtggtaggatggacagactggaatctggctttgaacccagaaggaggccccaattgggtgcgcaactttgttgacagccccatcattgtggatatcacaaaggacaccttctacaaacagcctatgttctatcatctggggcactttagcaagttcattccagagggttcccagagagtaggcttggttgcctcacagaagaatgatctggatgctgtggcactcctgcatcctgacgggagtgcagtggtggtagtactgaacaggtctagcaaagatgttcccttgactatcaaagacccagctgtgggctttctggaaaccatttcccctggatactctatccacacctatctctggagaagagattaatga

SEQ ID NO: 956 - protein, 536 aa, synthetic construct
  REGION 1..536: note = Variant of B-Glucocerebrosidase
MEFSSPSREECPKPLSRVSIMAGSLTGLLLLQAVSWASGARPCIPKSFGYSSVVCVCNATYCDSLDPLTLPALGTFSRYESTRSGRRMELSMGPIQANRTGTGLLLTLQPEQKFQKVKGFGGAMTDAAALNILALSPPAQNLLLKSYFSEEGIEYNIIRVPMASCDFSIRTYTYADTPDDFQLHNFSLPEEDTKWKIPLIHRALQLSQRPVSLFASPWTSPTWLKTNGAYNGAGSLKGQPGDIYHQTWARYFVKFLDAYAEHKLQFWAVTAENEPSAGLLSGYPFQCLGFTPEHQRDFIARDLGPTLANSTHHNVRLLILDDQRLLLPHWAKVVLTNPEAAKYVHGIAVHWYLDFLAPAKATLGETHRLFPNTTLFASEACVGSKFWEQSVRLGSWDRGMQYSHSIITNLLYHVVGWTDWNLALNPEGGPNWVRNFVDSPIIVDITKDTFYKQPMFYHLGHFSKFIPEGSQRVGLVASQKNDLDAVALLHPDGSAVVVVLNRSSKDVPLTIKDPAVGFLETISPGYSIHTYLWRRD

SEQ ID NO: 957 - DNA, 1614 bp, synthetic construct
  misc_feature 1..1614: note = Variant of B-Glucocerebrosidase
  source 1..1614: mol_type = other DNA
atggagttttcttctcctagtagagaagaatgccccaagccactgagcagggtgagcatcatggctggatccctcacagggctgcttcttttgcaggcagtctcatgggcctctggagccaggccctgtattcccaagtcattcggctactcctcagtggtgtgtgtatgcaatgccacctattgtgacagtctcgatcctctcactctccctgctctgggtaccttctcccggtatgagagcacaagaagtggaagacgcatggagctctcaatgggccctatacaggctaaccgcactgggacaggtctgctgctgaccctccaacctgaacagaagtttcagaaagtcaagggatttggaggagccatgactgatgcagcagcactcaacatcttggccctgtctccaccagcccagaacctgctgttgaagtcctacttctcagaggaggggattgagtacaacatcatccgggttcccatggctagctgtgacttctccattaggacctatacatacgctgacacccccgatgattttcagctccataatttcagtctccctgaagaagacaccaaatggaagatacctctgattcacagagccttgcaactgtcccaaaggccagtgagcctcttcgcttctccctggactagtcctacatggctgaagactaatggtgcttacaatgggaagggctccctgaaaggacagccaggtgacatatatcatcagacatgggcccgctactttgtgaaattccttgatgcctatgcagagcacaaactccaattctgggcagtcaccgcagaaaacgagccctcagctgggctgctgtctggctacccctttcagtgcttgggctttactcctgagcatcaacgggacttcattgcccgggatttggggccaacactggccaacagcacccaccacaatgtaagactcctcattctggatgaccagaggctgctgctccctcattgggccaaggtggtgttgacagacccagaagctgccaaatatgttcatggcatcgctgtccactggtacctggattttttggcccctgccaaggccactctgggagagacccacagactcttccccaataccatgctgtttgcatcagaagcctgcgtggggagcaaattctgggagcagtctgttaggctgggttcctgggatcggggcatgcaatattcccatagtataataactaacctcctctaccacgtggtaggatggacagactggaatctggctttgaacccagaaggaggccccaattgggtgcgcaactttgttgacagccccatcattgtggatatcacaaaggacaccttctacaaacagcctatgttctatcatctggggcactttagcaagttcattccagagggttcccagagagtaggcttggttgcctcacagaagaatgatctggatgctgtggcactcctgcatcctgacgggagtgcagtggtggtagtactgaacaggtctagcaaagatgttcccttgactatcaaagaccctgctgtgggctttctggaaaccatttcccctggatactctatccacacctatctctggagaagacagtaatga

SEQ ID NO: 958 - protein, 536 aa, synthetic construct
  REGION 1..536: note = Variant of B-Glucocerebrosidase
MEFSSPSREECPKPLSRVSIMAGSLTGLLLLQAVSWASGARPCIPKSFGYSSVVCVCNATYCDSLDPLTLPALGTFSRYESTRSGRRMELSMGPIQANRTGTGLLLTLQPEQKFQKVKGFGGAMTDAAALNILALSPPAQNLLLKSYFSEEGIEYNIIRVPMASCDFSIRTYTYADTPDDFQLHNFSLPEEDTKWKIPLIHRALQLSQRPVSLFASPWTSPTWLKTNGAYNGKGSLKGQPGDIYHQTWARYFVKFLDAYAEHKLQFWAVTAENEPSAGLLSGYPFQCLGFTPEHQRDFIARDLGPTLANSTHHNVRLLILDDQRLLLPHWAKVVLTDPEAAKYVHGIAVHWYLDFLAPAKATLGETHRLFPNTMLFASEACVGSKFWEQSVRLGSWDRGMQYSHSIITNLLYHVVGWTDWNLALNPEGGPNWVRNFVDSPIIVDITKDTFYKQPMFYHLGHFSKFIPEGSQRVGLVASQKNDLDAVALLHPDGSAVVVVLNRSSKDVPLTIKDPAVGFLETISPGYSIHTYLWRRQ

SEQ ID NO: 959 - DNA, 1614 bp, synthetic construct
  misc_feature 1..1614: note = Variant of B-Glucocerebrosidase
  source 1..1614: mol_type = other DNA
atggagttttcttctcctagtagagaagaatgccccaagccactgagcagggtgagcatcatggctggatccctcacagggctgcttcttttgcaggcagtctcatgggcctctggagccaggccctgtattcccaagtcattcggctactcctcagtggtgtgtgtatgcaatgccacctattgtgacagtctcgatcctctcactctccctgctctgggtaccttctcccggtatgagagcacaagaagtggaagacgcatggagctctcaatgggccctatacaggctaaccgcactgggacaggtctgctgctgaccctccaacctgaacagaagtttcagaaagtcaagggatttggaggagccatgactgatgcagcagcactcaacatcttggccctgtctccaccagcccagaacctgctgttgaagtcctacttctcagaggaggggattgagtacaacatcatccgggttcccatggctagctgtgacttctccattaggacctatacatacgctgacacccccgatgattttcagctccataatttcagtctccctgaagaagacaccaaatggaagatacctctgattcacagagccttgcaactgtcccaaaggccagtgagcctcttcgcttctccctggactagtcctacatggctgaagactaatggtgcttacaatgggaagggctccctgaaaggacagccaggtgacatatatcatcagacatgggcccgctactttgtgaaattccttgatgcctatgcagagcacaaactccaattctgggcagtcaccgcagaaaacgagccctcagctgggctgctgtctggctacccctttcagtgcttgggctttactcctgagcatcaacgggacttcattgcccgggatttggggccaacactggccaacagcacccaccacaatgtaagactcctcattctggatgaccagaggctgctgctccctcattgggccaaggtggtgttgacaaacccagaagctgccaaatatgttcatggcatcgctgtccactggtacctggattttttggcccctcccaagtggactctgggagagacccacagactcttccccaataccatgctgtttgcatcagaagcctgcgtggggagcaaattctgggagcagtctgttaggctgggttcctgggatcggggcatgcaatattcccatagtataataactaacctcctctaccacgtggtaggatggacagactggaatctggctttgaacccagaaggaggccccaattgggtgcgcaactttgttgacagccccatcattgtggatatcacaaaggacaccttctacaaacagcctatgttctatcatctggggcactttagcaagttcattccagagggttcccagagagtaggcttggttgcctcacagaagaatgatctggatgctgtggcactcctgcatcctgacgggagtgcagtggtggtagtactgaacaggtctagcaaagatgttcccttgactatcaaagacccagctgtgggctttctggaaaccatttcccctggatactctatccacacctatctctggagaagacagtaatga

SEQ ID NO: 960 - protein, 536 aa, synthetic construct
  REGION 1..536: note = Variant of B-Glucocerebrosidase
MEFSSPSREECPKPLSRVSIMAGSLTGLLLLQAVSWASGARPCIPKSFGYSSVVCVCNATYCDSLDPLTLPALGTFSRYESTRSGRRMELSMGPIQANRTGTGLLLTLQPEQKFQKVKGFGGAMTDAAALNILALSPPAQNLLLKSYFSEEGIEYNIIRVPMASCDFSIRTYTYADTPDDFQLHNFSLPEEDTKWKIPLIHRALQLSQRPVSLFASPWTSPTWLKTNGAYNGKGSLKGQPGDIYHQTWARYFVKFLDAYAEHKLQFWAVTAENEPSAGLLSGYPFQCLGFTPEHQRDFIARDLGPTLANSTHHNVRLLILDDQRLLLPHWAKVVLTNPEAAKYVHGIAVHWYLDFLAPPKWTLGETHRLFPNTMLFASEACVGSKFWEQSVRLGSWDRGMQYSHSIITNLLYHVVGWTDWNLALNPEGGPNWVRNFVDSPIIVDITKDTFYKQPMFYHLGHFSKFIPEGSQRVGLVASQKNDLDAVALLHPDGSAVVVVLNRSSKDVPLTIKDPAVGFLETISPGYSIHTYLWRRQ

SEQ ID NO: 961 - DNA, 1614 bp, synthetic construct
  misc_feature 1..1614: note = Variant of B-Glucocerebrosidase
  source 1..1614: mol_type = other DNA
atggagttttcttctcctagtagagaagaatgccccaagccactgagcagggtgagcatcatggctggatccctcacagggctgcttcttttgcaggcagtctcatgggcctctggagccaggccctgtattcccaagtcattcggctactcctcagtggtgtgtgtatgcaatgccacctattgtgacagtctcgatcctctcactctccctgctctgggtaccttctcccggtatgagagcacaagaagtggaagacgcatggagctctcaatgggccctatacaggctaaccgcactgggacaggtctgctgctgaccctccaacctgaacagaagtttcagaaagtcaagggatttggaggagccatgactgatgcagcagcactcaacatcttggccctgtctccaccagcccagaacctgctgttgaagtcctacttctcagaggaggggattgagtacaacatcatccgggttcccatggctagctgtgacttctccattaggacctatacatacgctgacacccccgatgattttcagctccataatttcagtctccctgaagaagacaccaaactgaagatacctctgattcacagagccttgcaactgtcccaaaggccagtgagcctcttcgcttctccctggactagtcctacatggctgaagactaatggtgcttacaatgggaagggctccctgaaaggacagccaggtgacatatatcatcagacatgggcccgctactttgtgaaattccttgatgcctatgcagagcacgggctccaattctgggcagtcaccgcagaaaacgagccctcagctgggctgctgtctggctacccctttcagtgcttgggctttactcctgagcatcaacgggacttcattgcccgggatttggggccaacactggccaacagcacccaccacaatgtaagactcctcattctggatgaccagaggctgctgctccctcattgggccaaggtggtgttgacagacccagaagctgccaaatatgttcatggcatcgctgtccactggtacctggattttttggcccctgcaaaggctactctgggagagacccacagactcttccccaataccatgctgtttgcatcagaagcctgcgtggggagcaaattctgggagcagtctgttaggctgggttcctgggatcggggcatgcaatattcccatagtataataactaacctcctctaccacgtggtaggatggacagactggaatctggctttgaacccagaaggaggccccaattgggtgcgcaactttgttgacagccccatcattgtggatatcacaaaggacaccttctacaaacagcctatgttctatcatctggggcactttagcaagttcattccagagggttcccagagagtaggcttggttgcctcacagaagaatgatctggatgctgtggcactcctgcatcctgacgggagtgcagtggtggtagtactgaacaggtctagcaaagatgttcccttgactatcaaagacccagctgtgggctttctggaaaccatttcccctggatactctatccacacctatctctggagaagacagtaatga

SEQ ID NO: 962 - protein, 536 aa, synthetic construct
  REGION 1..536: note = Variant of B-Glucocerebrosidase
MEFSSPSREECPKPLSRVSIMAGSLTGLLLLQAVSWASGARPCIPKSFGYSSVVCVCNATYCDSLDPLTLPALGTFSRYESTRSGRRMELSMGPIQANRTGTGLLLTLQPEQKFQKVKGFGGAMTDAAALNILALSPPAQNLLLKSYFSEEGIEYNIIRVPMASCDFSIRTYTYADTPDDFQLHNFSLPEEDTKLKIPLIHRALQLSQRPVSLFASPWTSPTWLKTNGAYNGKGSLKGQPGDIYHQTWARYFVKFLDAYAEHGLQFWAVTAENEPSAGLLSGYPFQCLGFTPEHQRDFIARDLGPTLANSTHHNVRLLILDDQRLLLPHWAKVVLTDPEAAKYVHGIAVHWYLDFLAPAKATLGETHRLFPNTMLFASEACVGSKFWEQSVRLGSWDRGMQYSHSIITNLLYHVVGWTDWNLALNPEGGPNWVRNFVDSPIIVDITKDTFYKQPMFYHLGHFSKFIPEGSQRVGLVASQKNDLDAVALLHPDGSAVVVVLNRSSKDVPLTIKDPAVGFLETISPGYSIHTYLWRRQ

SEQ ID NO: 963 - DNA, 1614 bp, synthetic construct
  misc_feature 1..1614: note = Variant of B-Glucocerebrosidase
  source 1..1614: mol_type = other DNA
atggagttttcttctcctagtagagaagaatgccccaagccactgagcagggtgagcatcatggctggatccctcacagggctgcttcttttgcaggcagtctcatgggcctctggagccaggccctgtattcccaagtcattcggctactcctcagtggtgtgtgtatgcaatgccacctattgtgacagtgtcgatcctctcactctccctgctctgggtaccttctcccggtatgagagcacaagaagtggaagacgcatggagctctcaatgggccctatacaggctaaccgcactgggacaggtctgctgctgaccctccaacctgaacagaagtttcagaaagtcaagggatttggaggagccatgactgatgcagcagcactcaacatcttggccctgtctccaccagcccagaacctgctgttgaagtcctacttctcagaggaggggattgagtacaacatcatccgggttcccatggctagctgtgacttctccattaggacctatacatacgctgacacccccgatgattttcagctccataatttcagtctccctgaagaagacaccaaactgaagatacctctgattcacagagccttgcaactgtcccaaaggccagtgagcctcttcgcttctccctggactagtcctacatggctgaagactaatggtgcttacaatgggggaggctccctgaaaggacagccaggtgacatatatcatcagacatgggcccgctactttgtgaaattccttgatgcctatgcagagcacaagctccaattctgggcagtcaccgcagaaaacgagccctcagctgggctgctgtctggctacccctttcagtgcttgggctttactcctgagcatcaacgggacttcattgcccgggatttggggccaacactggccaacagcacccaccacaatgtaagactcctcattctggatgaccagaggctgctgctccctcattgggccaaggtggtgttgacagacccagaagctgccaaatatgttcatggcatcgctgtccactggtacctggattttttggcccctgcaaaggctactctgggagagacccacagactcttccccaataccatgctgtttgcatcagaagcctgcgtggggagcaaattctgggagcagtctgttaggctgggttcctgggatcggggcatgcaatattcccatagtataataactaacctcctctaccacgtggtaggatggacagactggaatctggctttgaacccagaaggaggccccaattgggtgcgcaactttgttgacagccccatcattgtggatatcacaaaggacaccttctacaaacagcctatgttctatcatctggggcactttagcaagttcattccagagggttcccagagagtaggcttggttgcctcacagaagaatgatctggatgctgtggcactcctgcatcctgacgggagtgcagtggtggtagtactgaacaggtctagcaaagatgttcccttgactatcaaagaccctgctgtgggctttctggaaaccatttcccctggatactctatccacacctatctctggagaagacagtaatga

SEQ ID NO: 964 - protein, 536 aa, synthetic construct
  REGION 1..536: note = Variant of B-Glucocerebrosidase
MEFSSPSREECPKPLSRVSIMAGSLTGLLLLQAVSWASGARPCIPKSFGYSSVVCVCNATYCDSVDPLTLPALGTFSRYESTRSGRRMELSMGPIQANRTGTGLLLTLQPEQKFQKVKGFGGAMTDAAALNILALSPPAQNLLLKSYFSEEGIEYNIIRVPMASCDFSIRTYTYADTPDDFQLHNFSLPEEDTKLKIPLIHRALQLSQRPVSLFASPWTSPTWLKTNGAYNGGGSLKGQPGDIYHQTWARYFVKFLDAYAEHKLQFWAVTAENEPSAGLLSGYPFQCLGFTPEHQRDFIARDLGPTLANSTHHNVRLLILDDQRLLLPHWAKVVLTDPEAAKYVHGIAVHWYLDFLAPAKATLGETHRLFPNTMLFASEACVGSKFWEQSVRLGSWDRGMQYSHSIITNLLYHVVGWTDWNLALNPEGGPNWVRNFVDSPIIVDITKDTFYKQPMFYHLGHFSKFIPEGSQRVGLVASQKNDLDAVALLHPDGSAVVVVLNRSSKDVPLTIKDPAVGFLETISPGYSIHTYLWRRQ

SEQ ID NO: 965 - DNA, 1614 bp, synthetic construct
  misc_feature 1..1614: note = Variant of B-Glucocerebrosidase
  source 1..1614: mol_type = other DNA
atggagttttcttctcctagtagagaagaatgccccaagccactgagcagggtgagcatcatggctggatccctcacagggctgcttcttttgcaggcagtctcatgggcctctggagccaggccctgtattcccaagtcattcggctactcctcagtggtgtgtgtatgcaatgccacctattgtgacagtctcgatcctctcactctccctgctctgggtaccttctcccggtatgagagcacaagaagtggaagacgcatggagctctcaatgggccctatacaggctaaccgcactgggacaggtctgctgctgaccctccaacctgaacagaagtttcagaaagtcaagggatttggaggagccatgactgatgcagcagcactcaacatcttggccctgtctccaccagcccagaacctgctgttgaagtcctacttctcagaggaggggattgagtacaacatcatccgggttcccatggctagctgtgacttctccattaggacctatacatacgctgacacccccgatgattttcagctccataatttcagtctccctgaagaagacaccaaactgaagatacctctgattcacagagccttgcaactgtcccaaaggccagtgagcctcttcgcttctccctggactagtcctacatggctgaagactaatggtgctctgaatgggaaaggctccctgaaaggacagccaggtgacatatatcatcagacatgggcccgctactttgtgaaattccttgatgcctatgcagagcacgggctccaattctgggcagtcaccgcagaaaacgagccctcagctgggctgctgtctggctacccctttcagtgcttgggctttactcctgagcatcaacgggacttcattgcccgggatttggggccaacactggccaacagcacccaccacaatgtaagactcctcattctggatgaccagaggctgctgctccctcattgggccaaggtggtgttgacagacccagaagctgccaaatatgttcatggcatcgctgtccactggtacctggattttttggcccctgcaaaggctactctgggagagacccacagactcttccccaataccatgctgtttgcatcagaagcctgcgtggggagcaaattctgggagcagtctgttaggctgggttcctgggatcggggcatgcaatattcccatagtataataactaacctcctctaccacgtggtaggatggacagactggaatctggctttgaacccagaaggaggccccaattgggtgcgcaactttgttgacagccccatcattgtggatatcacaaaggacaccttctacaaacagcctatgttctatcatctggggcactttagcaagttcattccagagggttcccagagagtaggcttggttgcctcacagaagaatgatctggatgctgtggcactcctgcatcctgacgggagtgcagtggtggtagtactgaacaggtctagcaaagatgttcccttgactatcaaagacccagctgtgggctttctggaaaccatttcccctggatactctatccacacctatctctggagaagacagtaatga

SEQ ID NO: 966 - protein, 536 aa, synthetic construct
  REGION 1..536: note = Variant of B-Glucocerebrosidase
MEFSSPSREECPKPLSRVSIMAGSLTGLLLLQAVSWASGARPCIPKSFGYSSVVCVCNATYCDSLDPLTLPALGTFSRYESTRSGRRMELSMGPIQANRTGTGLLLTLQPEQKFQKVKGFGGAMTDAAALNILALSPPAQNLLLKSYFSEEGIEYNIIRVPMASCDFSIRTYTYADTPDDFQLHNFSLPEEDTKLKIPLIHRALQLSQRPVSLFASPWTSPTWLKTNGALNGKGSLKGQPGDIYHQTWARYFVKFLDAYAEHGLQFWAVTAENEPSAGLLSGYPFQCLGFTPEHQRDFIARDLGPTLANSTHHNVRLLILDDQRLLLPHWAKVVLTDPEAAKYVHGIAVHWYLDFLAPAKATLGETHRLFPNTMLFASEACVGSKFWEQSVRLGSWDRGMQYSHSIITNLLYHVVGWTDWNLALNPEGGPNWVRNFVDSPIIVDITKDTFYKQPMFYHLGHFSKFIPEGSQRVGLVASQKNDLDAVALLHPDGSAVVVVLNRSSKDVPLTIKDPAVGFLETISPGYSIHTYLWRRQ

SEQ ID NO: 967 - DNA, 1614 bp, synthetic construct
  misc_feature 1..1614: note = Variant of B-Glucocerebrosidase
  source 1..1614: mol_type = other DNA
atggagttttcttctcctagtagagaagaatgccccaagccactgagcagggtgagcatcatggctggatccctcacagggctgcttcttttgcaggcagtctcatgggcctctggagccaggccctgtattcccaagtcattcggctactcctcagtggtgtgtgtatgcaatgccacctattgtgacagtctcgatcctctcactctccctgctctgggtaccttctcccggtatgagagcacaagaagtggaagacgcatggagctctcaatgggccctatacaggctaaccgcactgggacaggtctgctgctgaccctccaacctgaacagaagtttcagaaagtcaagggatttggaggagccatgactgatgcagcagcactcaacatcttggccctgtctccaccagcccagaacctgctgttgaagtcctacttctcagaggaggggattgagtacaacatcatccgggttcccatggctagctgtgacttctccattaggacctatacatacgctgacacccccgatgattttcagctccataatttcagtctccctgaagaagacaccaaatggaagatacctctgattcacagagccttgcaactgtcccaaaggccagtgagcctcttcgcttctccctggactagtcctacatggctgaagactaatggtgcttacaatgggaagggctccctgaaaggacagccaggtgacatatatcatcagacatgggcccgctactttgtgaaattccttgatgcctatgcagagcacaaactccaattctgggcagtcaccgcagaaaacgagccctcagctgggctgctgtctggctacccctttcagtgcttgggctttactcctgagcatcaacgggacttcattgcccgggatttggggccaacactggccaacagcacccaccacaatgtaagactcctcattctggatgaccagaggctgctgctccctcattgggccaaggtggtgttgacaaacccagaagctgccaaatatgttcatggcatcgctgtccactggtacctggattttttggcccctgccaagtggactctgggagagacccacagactcttccccaataccacactgtttgcatcagaagcctgcgtggggagcaaattctgggagcagtctgttaggctgggttcctgggatcggggcatgcaatattcccatagtataataactaacctcctctaccacgtggtaggatggacagactggaatctggctttgaacccagaaggaggccccaattgggtgcgcaactttgttgacagccccatcattgtggatatcacaaaggacaccttctacaaacagcctatgttctatcatctggggcactttagcaagttcattccagagggttccactagagtaggcttggttgcctcacagaagaatgatctggatgctgtggcactcctgcatcctgacgggagtgcagtggtggtagtactgaacaggtctagcaaagatgttcccttgactatcaaagaccctgctgtgggctttctggaaaccatttcccctggatactctatccacacctatctctggagaagacagtaatga

SEQ ID NO: 968 - protein, 536 aa, synthetic construct
  REGION 1..536: note = Variant of B-Glucocerebrosidase
MEFSSPSREECPKPLSRVSIMAGSLTGLLLLQAVSWASGARPCIPKSFGYSSVVCVCNATYCDSLDPLTLPALGTFSRYESTRSGRRMELSMGPIQANRTGTGLLLTLQPEQKFQKVKGFGGAMTDAAALNILALSPPAQNLLLKSYFSEEGIEYNIIRVPMASCDFSIRTYTYADTPDDFQLHNFSLPEEDTKWKIPLIHRALQLSQRPVSLFASPWTSPTWLKTNGAYNGKGSLKGQPGDIYHQTWARYFVKFLDAYAEHKLQFWAVTAENEPSAGLLSGYPFQCLGFTPEHQRDFIARDLGPTLANSTHHNVRLLILDDQRLLLPHWAKVVLTNPEAAKYVHGIAVHWYLDFLAPAKWTLGETHRLFPNTTLFASEACVGSKFWEQSVRLGSWDRGMQYSHSIITNLLYHVVGWTDWNLALNPEGGPNWVRNFVDSPIIVDITKDTFYKQPMFYHLGHFSKFIPEGSTRVGLVASQKNDLDAVALLHPDGSAVVVVLNRSSKDVPLTIKDPAVGFLETISPGYSIHTYLWRRQ

SEQ ID NO: 969 - DNA, 1614 bp, synthetic construct
  misc_feature 1..1614: note = Variant of B-Glucocerebrosidase
  source 1..1614: mol_type = other DNA
atggagttttcttctcctagtagagaagaatgccccaagccactgagcagggtgagcatcatggctggatccctcacagggctgcttcttttgcaggcagtctcatgggcctctggagccaggccctgtattcccaagtcattcggctactcctcagtggtgtgtgtatgcaatgccacctattgtgacagtgtcgatcctctcactctccctgctctgggtaccttctcccggtatgagagcacaagaagtggaagacgcatggagctctcaatgggccctatacaggctaaccgcactgggacaggtctgctgctgaccctccaacctgaacagaagtttcagaaagtcaagggatttggaggagccatgactgatgcagcagcactcaacatcttggccctgtctccaccagcccagaacctgctgttgaagtcctacttctcagaggaggggattgagtacaacatcatccgggttcccatggctagctgtgacttctccattaggacctatacatacgctgacacccccgatgattttcagctccataatttcagtctccctgaagaagacaccaaatggaagatacctctgattcacagagccttgcaactgtcccaaaggccagtgagcctcttcgcttctccctggactagtcctacatggctgaagactaatggtgctctgaatgggaaaggctccctgaaaggacagccaggtgacatatatcatcagacatgggcccgctactttgtgaaattccttgatgcctatgcagagcacaagctccaattctgggcagtcaccgcagaaaacgagccctcagctgggctgctgtctggctacccctttcagtgcttgggctttactcctgagcatcaacgggacttcattgcccgggatttggggccaacactggccaacagcacccaccacaatgtaagactcctcattctggatgaccagaggctgctgctccctcattgggccaaggtggtgttgacagacccagaagctgccaaatatgttcatggcatcgctgtccactggtacctggattttttggcccctgcaaaggctactctgggagagacccacagactcttccccaataccatgctgtttgcatcagaagcctgcgtggggagcaaattctgggagcagtctgttaggctgggttcctgggatcggggcatgcaatattcccatagtataataactaacctcctctaccacgtggtaggatggacagactggaatctggctttgaacccagaaggaggccccaattgggtgcgcaactttgttgacagccccatcattgtggatatcacaaaggacaccttctacaaacagcctatgttctatcatctggggcactttagcaagttcattccagagggttcccagagagtaggcttggttgcctcacagaagaatgatctggatgctgtggcactcctgcatcctgacgggagtgcagtggtggtagtactgaacaggtctagcaaagatgttcccttgactatcaaagacccagctgtgggctttctggaaaccatttcccctggatactctatccacacctatctctggagaagacagtaatga

SEQ ID NO: 970 - protein, 536 aa, synthetic construct
  REGION 1..536: note = Variant of B-Glucocerebrosidase
MEFSSPSREECPKPLSRVSIMAGSLTGLLLLQAVSWASGARPCIPKSFGYSSVVCVCNATYCDSVDPLTLPALGTFSRYESTRSGRRMELSMGPIQANRTGTGLLLTLQPEQKFQKVKGFGGAMTDAAALNILALSPPAQNLLLKSYFSEEGIEYNIIRVPMASCDFSIRTYTYADTPDDFQLHNFSLPEEDTKWKIPLIHRALQLSQRPVSLFASPWTSPTWLKTNGALNGKGSLKGQPGDIYHQTWARYFVKFLDAYAEHKLQFWAVTAENEPSAGLLSGYPFQCLGFTPEHQRDFIARDLGPTLANSTHHNVRLLILDDQRLLLPHWAKVVLTDPEAAKYVHGIAVHWYLDFLAPAKATLGETHRLFPNTMLFASEACVGSKFWEQSVRLGSWDRGMQYSHSIITNLLYHVVGWTDWNLALNPEGGPNWVRNFVDSPIIVDITKDTFYKQPMFYHLGHFSKFIPEGSQRVGLVASQKNDLDAVALLHPDGSAVVVVLNRSSKDVPLTIKDPAVGFLETISPGYSIHTYLWRRQ

SEQ ID NO: 971 - DNA, 1614 bp, synthetic construct
  misc_feature 1..1614: note = Variant of B-Glucocerebrosidase
  source 1..1614: mol_type = other DNA
atggagttttcttctcctagtagagaagaatgccccaagccactgagcagggtgagcatcatggctggatccctcacagggctgcttcttttgcaggcagtctcatgggcctctggagccaggccctgtattcccaagtcattcggctactcctcagtggtgtgtgtatgcaatgccacctattgtgacagtctcgatcctctcactctccctgctctgggtaccttctcccggtatgagagcacaagaagtggaagacgcatggagctctcaatgggccctatacaggctaaccgcactgggacaggtctgctgctgaccctccaacctgaacagaagtttcagaaagtcaagggatttggaggagccatgactgatgcagcagcactcaacatcttggccctgtctccaccagcccagaacctgctgttgaagtcctacttctcagaggaggggattgagtacaacatcatccgggttcccatggctagctgtgacttctccattaggacctatacatacgctgacacccccgatgattttcagctccataatttcagtctccctgaagaagacaccaaactgaagatacctctgattcacagagccttgcaactgtcccaaaggccagtgagcctcttcgcttctccctggactagtcctacatggctgaagactaatggtgctctgaatgggaaaggctccctgaaaggacagccaggtgacatatatcatcagacatgggcccgctactttgtgaaattccttgatgcctatgcagagcacaagctccaattctgggcagtcaccgcagaaaacgagccctcagctgggctgctgtctggctacccctttcagtgcttgggctttactcctgagcatcaacgggacttcattgcccgggatttggggccaacactggccaacagcacccaccacaatgtaagactcctcattctggatgaccagaggctgctgctccctcattgggccaaggtggtgttgacagacccagaagctgccaaatatgttcatggcatcgctgtccactggtacctggattttttggcccctgcaaaggctactctgggagagacccacagactcttccccaataccacactgtttgcatcagaagcctgcgtggggagcaaattctgggagcagtctgttaggctgggttcctgggatcggggcatgcaatattcccatagtataataactaacctcctctaccacgtggtaggatggacagactggaatctggctttgaacccagaaggaggccccaattgggtgcgcaactttgttgacagccccatcattgtggatatcacaaaggacaccttctacaaacagcctatgttctatcatctggggcactttagcaagttcattccagagggttccactagagtaggcttggttgcctcacagaagaatgatctggatgctgtggcactcctgcatcctgacgggagtgcagtggtggtagtactgaacaggtctagcaaagatgttcccttgactatcaaagaccctgctgtgggctttctggaaaccatttcccctggatactctatccacacctatctctggagaagacagtaatga

SEQ ID NO: 972 - protein, 536 aa, synthetic construct
  REGION 1..536: note = Variant of B-Glucocerebrosidase
MEFSSPSREECPKPLSRVSIMAGSLTGLLLLQAVSWASGARPCIPKSFGYSSVVCVCNATYCDSLDPLTLPALGTFSRYESTRSGRRMELSMGPIQANRTGTGLLLTLQPEQKFQKVKGFGGAMTDAAALNILALSPPAQNLLLKSYFSEEGIEYNIIRVPMASCDFSIRTYTYADTPDDFQLHNFSLPEEDTKLKIPLIHRALQLSQRPVSLFASPWTSPTWLKTNGALNGKGSLKGQPGDIYHQTWARYFVKFLDAYAEHKLQFWAVTAENEPSAGLLSGYPFQCLGFTPEHQRDFIARDLGPTLANSTHHNVRLLILDDQRLLLPHWAKVVLTDPEAAKYVHGIAVHWYLDFLAPAKATLGETHRLFPNTTLFASEACVGSKFWEQSVRLGSWDRGMQYSHSIITNLLYHVVGWTDWNLALNPEGGPNWVRNFVDSPIIVDITKDTFYKQPMFYHLGHFSKFIPEGSTRVGLVASQKNDLDAVALLHPDGSAVVVVLNRSSKDVPLTIKDPAVGFLETISPGYSIHTYLWRRQ

SEQ ID NO: 973 - DNA, 1614 bp, synthetic construct
  misc_feature 1..1614: note = Variant of B-Glucocerebrosidase
  source 1..1614: mol_type = other DNA
atggagttttcttctcctagtagagaagaatgccccaagccactgagcagggtgagcatcatggctggatccctcacagggctgcttcttttgcaggcagtctcatgggcctctggagccaggccctgtattcccaagtcattcggctactcctcagtggtgtgtgtatgcaatgccacctattgtgacagtctcgatcctctcactctccctgctctgggtaccttctcccggtatgagagcacaagaagtggaagacgcatggagctctcaatgggccctatacaggctaaccgcactgggacaggtctgctgctgaccctccaacctgaacagaagtttcagaaagtcaagggatttggaggagccatgactgatgcagcagcactcaacatcttggccctgtctccaccagcccagaacctgctgttgaagtcctacttctcagaggaggggattgagtacaacatcatccgggttcccatggctagctgtgacttctccattaggacctatacatacgctgacacccccgatgattttcagctccataatttcagtctccctgaagaagacaccaaactgaagatacctctgattcacagagccttgcaactgtcccaaaggccagtgagcctcttcgcttctccctggactagtcctacatggctgaagactaatggtgctctgaatgggaaaggctccctgaaaggacagccaggtgacatatatcatcagacatgggcccgctactttgtgaaattccttgatgcctatgcagagcacaagctccaattctgggcagtcaccgcagaaaacgagccctcagctgggctgctgtctggctacccctttcagtgcttgggctttactcctgagcatcaacgggacttcattgcccgggatttggggccaacactggccaacagcacccaccacaatgtaagactcctcattctggatgaccagaggctgctgctccctcattgggccaaggtggtgttgacagacccagaagctgccaaatatgttcatggcatcgctgtccactggtacctggattttttggcccctgccaaggccactctgggagagacccacagactcttccccaataccacactgtttgcatcagaagcctgcgtggggagcaaattctgggagcagtctgttaggctgggttcctgggatcggggcatgcaatattcccatagtataataactaacctcctctaccacgtggtaggatggacagactggaatctggctttgaacccagaaggaggccccaattgggtgcgcaactttgttgacagccccatcattgtggatatcacaaaggacaccttctacaaacagcctatgttctatcatctggggcactttagcaagttcattccagagggttcccagagagtaggcttggttgcctcacagaagaatgatctggatgctgtggcactcctgcatcctgacgggagtgcagtggtggtagtactgaacaggtctagcaaagatgttcccttgactatcaaagaccctgctgtgggctttctggaaaccatttcccctggatactctatccacacctatctctggagaagagattaatga

SEQ ID NO: 974 - protein, 536 aa, synthetic construct
  REGION 1..536: note = Variant of B-Glucocerebrosidase
MEFSSPSREECPKPLSRVSIMAGSLTGLLLLQAVSWASGARPCIPKSFGYSSVVCVCNATYCDSLDPLTLPALGTFSRYESTRSGRRMELSMGPIQANRTGTGLLLTLQPEQKFQKVKGFGGAMTDAAALNILALSPPAQNLLLKSYFSEEGIEYNIIRVPMASCDFSIRTYTYADTPDDFQLHNFSLPEEDTKLKIPLIHRALQLSQRPVSLFASPWTSPTWLKTNGALNGKGSLKGQPGDIYHQTWARYFVKFLDAYAEHKLQFWAVTAENEPSAGLLSGYPFQCLGFTPEHQRDFIARDLGPTLANSTHHNVRLLILDDQRLLLPHWAKVVLTDPEAAKYVHGIAVHWYLDFLAPAKATLGETHRLFPNTTLFASEACVGSKFWEQSVRLGSWDRGMQYSHSIITNLLYHVVGWTDWNLALNPEGGPNWVRNFVDSPIIVDITKDTFYKQPMFYHLGHFSKFIPEGSQRVGLVASQKNDLDAVALLHPDGSAVVVVLNRSSKDVPLTIKDPAVGFLETISPGYSIHTYLWRRD

SEQ ID NO: 975 - DNA, 1614 bp, synthetic construct
  misc_feature 1..1614: note = Variant of B-Glucocerebrosidase
  source 1..1614: mol_type = other DNA
atggagttttcttctcctagtagagaagaatgccccaagccactgagcagggtgagcatcatggctggatccctcacagggctgcttcttttgcaggcagtctcatgggcctctggagccaggccctgtattcccaagtcattcggctactcctcagtggtgtgtgtatgcaatgccacctattgtgacagtctcgatcctctcactctccctgctctgggtaccttctcccggtatgagagcacaagaagtggaagacgcatggagctctcaatgggccctatacaggctaaccgcactgggacaggtctgctgctgaccctccaacctgaacagaagtttcagaaagtcaagggatttggaggagccatgactgatgcagcagcactcaacatcttggccctgtctccaccagcccagaacctgctgttgaagtcctacttctcagaggaggggattgagtacaacatcatccgggttcccatggctagctgtgacttctccattaggacctatacatacgctgacacccccgatgattttcagctccataatttcagtctccctgaagaagacaccaaactgaagatacctctgattcacagagccttgcaactgtcccaaaggccagtgagcctcttcgcttctccctggactagtcctacatggctgaagactaatggtgctctgaatgggaaaggctccctgaaaggacggccaggtgacatatatcatcagacatgggcccgctactttgtgaaattccttgatgcctatgcagagcacaagctccaattctgggcagtcaccgcagaaaacgagccctcagctgggctgctgtctggctacccctttcagtgcttgggctttactcctgagcatcaacgggacttcattgcccgggatttggggccaacactggccaacagcacccaccacaatgtaagactcctcattctggatgaccagaggctgctgctccctcattgggccaaggtggtgttgacagacccagaagctgccaaatatgttcatggcatcgctgtccactggtacctggattttttggcccctgcaaaggctactctgggagagacccacagactcttccccaataccatgctgtttgcatcagaagcctgcgtggggagcaaattctgggagcagtctgttaggctgggttcctgggatcggggcatgcaatattcccatagtataataactaacctcctctaccacgtggtaggatggacagactggaatctggctttgaacccagaaggaggccccaattgggtgcgcaactttgttgacagccccatcattgtggatatcacaaaggacaccttctacaaacagcctatgttctatcatctggggcactttagcaagttcattccagagggttcccagagagtaggcttggttgcctcacagaagaatgatctggatgctgtggcactcctgcatcctgacgggagtgcagtggtggtagtactgaacaggtctagcaaagatgttcccttgactatcaaagacccagctgtgggctttctggaaaccatttcccctggatactctatccacacctatctctggagaagacagtaatga

SEQ ID NO: 976 - protein, 536 aa, synthetic construct
  REGION 1..536: note = Variant of B-Glucocerebrosidase
MEFSSPSREECPKPLSRVSIMAGSLTGLLLLQAVSWASGARPCIPKSFGYSSVVCVCNATYCDSLDPLTLPALGTFSRYESTRSGRRMELSMGPIQANRTGTGLLLTLQPEQKFQKVKGFGGAMTDAAALNILALSPPAQNLLLKSYFSEEGIEYNIIRVPMASCDFSIRTYTYADTPDDFQLHNFSLPEEDTKLKIPLIHRALQLSQRPVSLFASPWTSPTWLKTNGALNGKGSLKGRPGDIYHQTWARYFVKFLDAYAEHKLQFWAVTAENEPSAGLLSGYPFQCLGFTPEHQRDFIARDLGPTLANSTHHNVRLLILDDQRLLLPHWAKVVLTDPEAAKYVHGIAVHWYLDFLAPAKATLGETHRLFPNTMLFASEACVGSKFWEQSVRLGSWDRGMQYSHSIITNLLYHVVGWTDWNLALNPEGGPNWVRNFVDSPIIVDITKDTFYKQPMFYHLGHFSKFIPEGSQRVGLVASQKNDLDAVALLHPDGSAVVVVLNRSSKDVPLTIKDPAVGFLETISPGYSIHTYLWRRQ

SEQ ID NO: 977 - DNA, 1614 bp, synthetic construct
  misc_feature 1..1614: note = Variant of B-Glucocerebrosidase
  source 1..1614: mol_type = other DNA
atggagttttcttctcctagtagagaagaatgccccaagccactgagcagggtgagcatcatggctggatccctcacagggctgcttcttttgcaggcagtctcatgggcctctggagccaggccctgtattcccaagtcattcggctactcctcagtggtgtgtgtatgcaatgccacctattgtgacagtgtcgatcctctcactctccctgctctgggtaccttctcccggtatgagagcacaagaagtggaagacgcatggagctctcaatgggccctatacaggctaaccgcactgggacaggtctgctgctgaccctccaacctgaacagaagtttcagaaagtcaagggatttggaggagccatgactgatgcagcagcactcaacatcttggccctgtctccaccagcccagaacctgctgttgaagtcctacttctcagaggaggggattgagtacaacatcatccgggttcccatggctagctgtgacttctccattaggacctatacatacgctgacacccccgatgattttcagctccataatttcagtctccctgaagaagacaccaaactgaagatacctctgattcacagagccttgcaactgtcccaaaggccagtgagcctcttcgcttctccctggactagtcctacatggctgaagactaatggtgctctgaatgggaaaggctccctgaaaggacagccaggtgacatatatcatcagacatgggcccgctactttgtgaaattccttgatgcctatgcagagcacaagctccaattctgggcagtcaccgcagaaaacgagccctcagctgggctgctgtctggctacccctttcagtgcttgggctttactcctgagcatcaacgggacttcattgcccgggatttggggccaacactggccaacagcacccaccacaatgtaagactcctcattctggatgaccagaggctgctgctccctcattgggccaaggtggtgttgacagacccagaagctgccaaatatgttcatggcatcgctgtccactggtacctggattttttggcccctgcaaaggctactctgggagagacccacagactcttccccaataccatgctgtttgcatcagaagcctgcgtggggagcaaattctgggagcagtctgttaggctgggttcctgggatcggggcatgcaatattcccatagtataataactaacctcctctaccacgtggtaggatggacagactggaatctggctttgaacccagaaggaggccccaattgggtgcgcaactttgttgacagccccatcattgtggatatcacaaaggacaccttctacaaacagcctatgttctatcatctggggcactttagcaagttcattccagagggttcccagagagtaggcttggttgcctcacagaagaatgatctggatgctgtggcactcctgcatcctgacgggagtgcagtggtggtagtactgaacaggtctagcaaagatgttcccttgactatcaaagacccagctgtgggctttctggaaaccatttcccctggatactctatccacacctatctctggagaagacagtaatga

SEQ ID NO: 978 - protein, 536 aa, synthetic construct
  REGION 1..536: note = Variant of B-Glucocerebrosidase
MEFSSPSREECPKPLSRVSIMAGSLTGLLLLQAVSWASGARPCIPKSFGYSSVVCVCNATYCDSVDPLTLPALGTFSRYESTRSGRRMELSMGPIQANRTGTGLLLTLQPEQKFQKVKGFGGAMTDAAALNILALSPPAQNLLLKSYFSEEGIEYNIIRVPMASCDFSIRTYTYADTPDDFQLHNFSLPEEDTKLKIPLIHRALQLSQRPVSLFASPWTSPTWLKTNGALNGKGSLKGQPGDIYHQTWARYFVKFLDAYAEHKLQFWAVTAENEPSAGLLSGYPFQCLGFTPEHQRDFIARDLGPTLANSTHHNVRLLILDDQRLLLPHWAKVVLTDPEAAKYVHGIAVHWYLDFLAPAKATLGETHRLFPNTMLFASEACVGSKFWEQSVRLGSWDRGMQYSHSIITNLLYHVVGWTDWNLALNPEGGPNWVRNFVDSPIIVDITKDTFYKQPMFYHLGHFSKFIPEGSQRVGLVASQKNDLDAVALLHPDGSAVVVVLNRSSKDVPLTIKDPAVGFLETISPGYSIHTYLWRRQ

SEQ ID NO: 979 - DNA, 1614 bp, synthetic construct
  misc_feature 1..1614: note = Variant of B-Glucocerebrosidase
  source 1..1614: mol_type = other DNA
atggagttttcttctcctagtagagaagaatgccccaagccactgagcagggtgagcatcatggctggatccctcacagggctgcttcttttgcaggcagtctcatgggcctctggagccaggccctgtattcccaagtcattcggctactcctcagtggtgtgtgtatgcaatgccacctattgtgacagtctcgatcctctcactctccctgctctgggtaccttctcccggtatgagagcacaagaagtggaagacgcatggagctctcaatgggccctatacaggctaaccgcactgggacaggtctgctgctgaccctccaacctgaacagaagtttcagaaagtcaagggatttggaggagccatgactgatgcagcagcactcaacatcttggccctgtctccaccagcccagaacctgctgttgaagtcctacttctcagaggaggggattgagtacaacatcatccgggttcccatggctagctgtgacttctccattaggacctatacatacgctgacacccccgatgattttcagctccataatttcagtctccctgaagaagacaccaaactgaagatacctctgattcacagagccttgcaactgtcccaaaggccagtgagcctcttcgcttctccctggactagtcctacatggctgaagactaatggtgcttacaatgggggaggctccctgaaaggacagccaggtgacatatatcatcagacatgggcccgctactttgtgaaattccttgatgcctatgcagagcacaagctccaattctgggcagtcaccgcagaaaacgagccctcagctgggctgctgtctggctacccctttcagtgcttgggctttactcctgagcatcaacgggacttcattgcccgggatttggggccaacactggccaacagcacccaccacaatgtaagactcctcattctggatgaccagaggctgctgctccctcattgggccaaggtggtgttgacagacccagaagctgccaaatatgttcatggcatcgctgtccactggtacctggattttttggcccctgcaaaggctactctgggagagacccacagactcttccccaataccatgctgtttgcatcagaagcctgcgtggggagcaaattctgggagcagtctgttaggctgggttcctgggatcggggcatgcaatattcccatagtataataactaacctcctctaccacgtggtaggatggacagactggaatctggctttgaacccagaaggaggccccaattgggtgcgcaactttgttgacagccccatcattgtggatatcacaaaggacaccttctacaaacagcctatgttctatcatctggggcactttagcaagttcattccagagggttcccagagagtaggcttggttgcctcacagaagaatgatctggatgctgtggcactcctgcatcctgacgggagtgcagtggtggtagtactgaacaggtctagcaaagatgttcccttgactatcaaagacccagctgtgggctttctggaaaccatttcccctggatactctatccacacctatctctggagaagactgtaatga

SEQ ID NO: 980 - protein, 536 aa, synthetic construct
  REGION 1..536: note = Variant of B-Glucocerebrosidase
MEFSSPSREECPKPLSRVSIMAGSLTGLLLLQAVSWASGARPCIPKSFGYSSVVCVCNATYCDSLDPLTLPALGTFSRYESTRSGRRMELSMGPIQANRTGTGLLLTLQPEQKFQKVKGFGGAMTDAAALNILALSPPAQNLLLKSYFSEEGIEYNIIRVPMASCDFSIRTYTYADTPDDFQLHNFSLPEEDTKLKIPLIHRALQLSQRPVSLFASPWTSPTWLKTNGAYNGGGSLKGQPGDIYHQTWARYFVKFLDAYAEHKLQFWAVTAENEPSAGLLSGYPFQCLGFTPEHQRDFIARDLGPTLANSTHHNVRLLILDDQRLLLPHWAKVVLTDPEAAKYVHGIAVHWYLDFLAPAKATLGETHRLFPNTMLFASEACVGSKFWEQSVRLGSWDRGMQYSHSIITNLLYHVVGWTDWNLALNPEGGPNWVRNFVDSPIIVDITKDTFYKQPMFYHLGHFSKFIPEGSQRVGLVASQKNDLDAVALLHPDGSAVVVVLNRSSKDVPLTIKDPAVGFLETISPGYSIHTYLWRRL

SEQ ID NO: 981 - DNA, 1614 bp, synthetic construct
  misc_feature 1..1614: note = Variant of B-Glucocerebrosidase
  source 1..1614: mol_type = other DNA
atggagttttcttctcctagtagagaagaatgccccaagccactgagcagggtgagcatcatggctggatccctcacagggctgcttcttttgcaggcagtctcatgggcctctggagccaggccctgtattcccaagtcattcggctactcctcagtggtgtgtgtatgcaatgccacctattgtgacagtctcgatcctctcactctccctgctctgggtaccttctcccggtatgagagcacaagaagtggaagacgcatggagctctcaatgggccctatacaggctaaccgcactgggacaggtctgctgctgaccctccaacctgaacagaagtttcagaaagtcaagggatttggaggagccatgactgatgcagcagcactcaacatcttggccctgtctccaccagcccagaacctgctgttgaagtcctacttctcagaggaggggattgagtacaacatcatccgggttcccatggctagctgtgacttctccattaggacctatacatacgctgacacccccgatgattttcagctccataatttcagtctccctgaagaagacaccaaactgaagatacctctgattcacagagccttgcaactgtcccaaaggccagtgagcctcttcgcttctccctggactagtcctacatggctgaagactaatggtgcttacaatgggaagggctccctgaaaggacagccaggtgacatatatcatcagacatgggcccgctactttgtgaaattccttgatgcctatgcagagcacgggctccaattctgggcagtcaccgcagaaaacgagccctcagctgggctgctgtctggctacccctttcagtgcttgggctttactcctgagcatcaacgggacttcattgcccgggatttggggccaacactggccaacagcacccaccacaatgtaagactcctcattctggatgaccagaggctgctgctccctcattgggccaaggtggtgttgacagacccagaagctgccaaatatgttcatggcatcgctgtccactggtacctggattttttggcccctgccaaggccactctgggagagacccacagactcttccccaataccacactgtttgcatcagaagcctgcgtggggagcaaattctgggagcagtctgttaggctgggttcctgggatcggggcatgcaatattcccatagtataataactaacctcctctaccacgtggtaggatggacagactggaatctggctttgaacccagaaggaggccccaattgggtgcgcaactttgttgacagccccatcattgtggatatcacaaaggacaccttctacaaacagcctatgttctatcatctggggcactttagcaagttcattccagagggttcccagagagtaggcttggttgcctcacagaagaatgatctggatgctgtggcactcctgcatcctgacgggagtgcagtggtggtagtactgaacaggtctagcaaagatgttcccttgactatcaaagaccctgctgtgggctttctggaaaccatttcccctggatactctatccacacctatctctggagaagacagtaatga

SEQ ID NO: 982 - protein, 536 aa, synthetic construct
  REGION 1..536: note = Variant of B-Glucocerebrosidase
MEFSSPSREECPKPLSRVSIMAGSLTGLLLLQAVSWASGARPCIPKSFGYSSVVCVCNATYCDSLDPLTLPALGTFSRYESTRSGRRMELSMGPIQANRTGTGLLLTLQPEQKFQKVKGFGGAMTDAAALNILALSPPAQNLLLKSYFSEEGIEYNIIRVPMASCDFSIRTYTYADTPDDFQLHNFSLPEEDTKLKIPLIHRALQLSQRPVSLFASPWTSPTWLKTNGAYNGKGSLKGQPGDIYHQTWARYFVKFLDAYAEHGLQFWAVTAENEPSAGLLSGYPFQCLGFTPEHQRDFIARDLGPTLANSTHHNVRLLILDDQRLLLPHWAKVVLTDPEAAKYVHGIAVHWYLDFLAPAKATLGETHRLFPNTTLFASEACVGSKFWEQSVRLGSWDRGMQYSHSIITNLLYHVVGWTDWNLALNPEGGPNWVRNFVDSPIIVDITKDTFYKQPMFYHLGHFSKFIPEGSQRVGLVASQKNDLDAVALLHPDGSAVVVVLNRSSKDVPLTIKDPAVGFLETISPGYSIHTYLWRRQ

SEQ ID NO: 983 - DNA, 1614 bp, synthetic construct
  misc_feature 1..1614: note = Variant of B-Glucocerebrosidase
  source 1..1614: mol_type = other DNA
atggagttttcttctcctagtagagaagaatgccccaagccactgagcagggtgagcatcatggctggatccctcacagggctgcttcttttgcaggcagtctcatgggcctctggagccaggccctgtattcccaagtcattcggctactcctcagtggtgtgtgtatgcaatgccacctattgtgacagtgtcgatcctctcactctccctgctctgggtaccttctcccggtatgagagcacaagaagtggaagacgcatggagctctcaatgggccctatacaggctaaccgcactgggacaggtctgctgctgaccctccaacctgaacagaagtttcagaaagtcaagggatttggaggagccatgactgatgcagcagcactcaacatcttggccctgtctccaccagcccagaacctgctgttgaagtcctacttctcagaggaggggattgagtacaacatcatccgggttcccatggctagctgtgacttctccattaggacctatacatacgctgacacccccgatgattttcagctccataatttcagtctccctgaagaagacaccaaatggaagatacctctgattcacagagccttgcaactgtcccaaaggccagtgagcctcttcgcttctccctggactagtcctacatggctgaagactaatggtgcttacaatgggaagggctccctgaaaggacagccaggtgacatatatcatcagacatgggcccgctactttgtgaaattccttgatgcctatgcagagcacgggctccaattctgggcagtcaccgcagaaaacgagccctcagctgggctgctgtctggctacccctttcagtgcttgggctttactcctgagcatcaacgggacttcattgcccgggatttggggccaacactggccaacagcacccaccacaatgtaagactcctcattctggatgaccagaggctgctgctccctcattgggccaaggtggtgttgacaaacccagaagctgccaaatatgttcatggcatcgctgtccactggtacctggattttttggcccctgccaagtggactctgggagagacccacagactcttccccaataccacactgtttgcatcagaagcctgcgtggggagcaaattctgggagcagtctgttaggctgggttcctgggatcggggcatgcaatattcccatagtataataactaacctcctctaccacgtggtaggatggacagactggaatctggctttgaacccagaaggaggccccaattgggtgcgcaactttgttgacagccccatcattgtggatatcacaaaggacaccttctacaaacagcctatgttctatcatctggggcactttagcaagttcattccagagggttccactagagtaggcttggttgcctcacagaagaatgatctggatgctgtggcactcctgcatcctgacgggagtgcagtggtggtagtactgaacaggtctagcaaagatgttcccttgactatcaaagacccagctgtgggctttctggaaaccatttcccctggatactctatccacacctatctctggagaagacagtaatga

SEQ ID NO: 984 - protein, 536 aa, synthetic construct
  REGION 1..536: note = Variant of B-Glucocerebrosidase
MEFSSPSREECPKPLSRVSIMAGSLTGLLLLQAVSWASGARPCIPKSFGYSSVVCVCNATYCDSVDPLTLPALGTFSRYESTRSGRRMELSMGPIQANRTGTGLLLTLQPEQKFQKVKGFGGAMTDAAALNILALSPPAQNLLLKSYFSEEGIEYNIIRVPMASCDFSIRTYTYADTPDDFQLHNFSLPEEDTKWKIPLIHRALQLSQRPVSLFASPWTSPTWLKTNGAYNGKGSLKGQPGDIYHQTWARYFVKFLDAYAEHGLQFWAVTAENEPSAGLLSGYPFQCLGFTPEHQRDFIARDLGPTLANSTHHNVRLLILDDQRLLLPHWAKVVLTNPEAAKYVHGIAVHWYLDFLAPAKWTLGETHRLFPNTTLFASEACVGSKFWEQSVRLGSWDRGMQYSHSIITNLLYHVVGWTDWNLALNPEGGPNWVRNFVDSPIIVDITKDTFYKQPMFYHLGHFSKFIPEGSTRVGLVASQKNDLDAVALLHPDGSAVVVVLNRSSKDVPLTIKDPAVGFLETISPGYSIHTYLWRRQ

SEQ ID NO: 985 - DNA, 1614 bp, synthetic construct
  misc_feature 1..1614: note = Variant of B-Glucocerebrosidase
  source 1..1614: mol_type = other DNA
atggagttttcttctcctagtagagaagaatgccccaagccactgagcagggtgagcatcatggctggatccctcacagggctgcttcttttgcaggcagtctcatgggcctctggagccaggccctgtattcccaagtcattcggctactcctcagtggtgtgtgtatgcaatgccacctattgtgacagtctcgatcctctcactctccctgctctgggtaccttctcccgggttgagagcacaagaagtggaagacgcatggagctctcaatgggccctatacaggctaaccgcactgggacaggtctgctgctgaccctccaacctgaacagaagtttcagaaagtcaagggatttggaggagccatgactgatgcagcagcactcaacatcttggccctgtctccaccagcccagaacctgctgttgaagtcctacttctcagaggaggggattgagtacaacatcatccgggttcccatggctagctgtgacttctccattaggacctatacatacgctgacacccccgatgattttcagctccataatttcagtctccctgaagaagacaccaaactgaagatacctctgattcacagagccttgcaactgtcccaaaggccagtgagcctcttcgcttctccctggactagtcctacatggctgaagactaatggtgctctgaatgggaaaggctccctgaaaggacagccaggtgacatatatcatcagacatgggcccgctactttgtgaaattccttgatgcctatgcagagcacaagctccaattctgggcagtcaccgcagaaaacgagccctcagctgggctgctgtctggctacccctttcagtgcttgggctttactcctgagcatcaacgggacttcattgcccgggatttggggccaacactggccaacagcacccaccacaatgtaagactcctcattctggatgaccagaggctgctgctccctcattgggccaaggtggtgttgacagacccagaagctgccaaatatgttcatggcatcgctgtccactggtacctggattttttggcccctgcaaaggctactctgggagagacccacagactcttccccaataccacactgtttgcatcagaagcctgcgtggggagcaaattctgggagcagtctgttaggctgggttcctgggatcggggcatgcaatattcccatagtataataactaacctcctctaccacgtggtaggatggacagactggaatctggctttgaacccagaaggaggccccaattgggtgcgcaactttgttgacagccccatcattgtggatatcacaaaggacaccttctacaaacagcctatgttctatcatctggggcactttagcaagttcattccagagggttcccagagagtaggcttggttgcctcacagaagaatgatctggatgctgtggcactcctgcatcctgacgggagtgcagtggtggtagtactgaacaggtctagcaaagatgttcccttgactatcaaagaccctgctgtgggctttctggaaaccatttcccctggatactctatccacacctatctctggagaagacagtaatga

SEQ ID NO: 986 - protein, 536 aa, synthetic construct
  REGION 1..536: note = Variant of B-Glucocerebrosidase
MEFSSPSREECPKPLSRVSIMAGSLTGLLLLQAVSWASGARPCIPKSFGYSSVVCVCNATYCDSLDPLTLPALGTFSRVESTRSGRRMELSMGPIQANRTGTGLLLTLQPEQKFQKVKGFGGAMTDAAALNILALSPPAQNLLLKSYFSEEGIEYNIIRVPMASCDFSIRTYTYADTPDDFQLHNFSLPEEDTKLKIPLIHRALQLSQRPVSLFASPWTSPTWLKTNGALNGKGSLKGQPGDIYHQTWARYFVKFLDAYAEHKLQFWAVTAENEPSAGLLSGYPFQCLGFTPEHQRDFIARDLGPTLANSTHHNVRLLILDDQRLLLPHWAKVVLTDPEAAKYVHGIAVHWYLDFLAPAKATLGETHRLFPNTTLFASEACVGSKFWEQSVRLGSWDRGMQYSHSIITNLLYHVVGWTDWNLALNPEGGPNWVRNFVDSPIIVDITKDTFYKQPMFYHLGHFSKFIPEGSQRVGLVASQKNDLDAVALLHPDGSAVVVVLNRSSKDVPLTIKDPAVGFLETISPGYSIHTYLWRRQ

SEQ ID NO: 987 - DNA, 1614 bp, synthetic construct
  misc_feature 1..1614: note = Variant of B-Glucocerebrosidase
  source 1..1614: mol_type = other DNA
atggagttttcttctcctagtagagaagaatgccccaagccactgagcagggtgagcatcatggctggatccctcacagggctgcttcttttgcaggcagtctcatgggcctctggagccaggccctgtattcccaagtcattcggctactcctcagtggtgtgtgtatgcaatgccacctattgtgacagtgtcgatcctctcactctccctgctctgggtaccttctcccggtatgagagcacaagaagtggaagacgcatggagctctcaatgggccctatacaggctaaccgcactgggacaggtctgctgctgaccctccaacctgaacagaagtttcagaaagtcaagggatttggaggagccatgactgatgcagcagcactcaacatcttggccctgtctccaccagcccagaacctgctgttgaagtcctacttctcagaggaggggattgagtacaacatcatccgggttcccatggctagctgtgacttctccattaggacctatacatacgctgacacccccgatgattttcagctccataatttcagtctccctgaagaagacaccaaactgaagatacctctgattcacagagccttgcaactgtcccaaaggccagtgagcctcttcgcttctccctggactagtcctacatggctgaagactaatggtgctctcaatgggaagggctccctgaaaggacagccaggtgacatatatcatcagacatgggcccgctactttgtgaaattccttgatgcctatgcagagcacaagctccaattctgggcagtcaccgcagaaaacgagccctcagctgggctgctgtctggctacccctttcagtgcttgggctttactcctgagcatcaacgggacttcattgcccgggatttggggccaacactggccaacagcacccaccacaatgtaagactcctcattctggatgaccagaggctgctgctccctcattgggccaaggtggtgttgacagacccagaagctgccaaatatgttcatggcatcgctgtccactggtacctggattttttggcccctgccaagtggactctgggagagacccacagactcttccccaataccacactgtttgcatcagaagcctgcgtggggagcaaattctgggagcagtctgttaggctgggttcctgggatcggggcatgcaatattcccatagtataataactaacctcctctaccacgtggtaggatggacagactggaatctggctttgaacccagaaggaggccccaattgggtgcgcaactttgttgacagccccatcattgtggatatcacaaaggacaccttctacaaacagcctatgttctatcatctggggcactttagcaagttcattccagagggttccactagagtaggcttggttgcctcacagaagaatgatctggatgctgtggcactcctgcatcctgacgggagtgcagtggtggtagtactgaacaggtctagcaaagatgttcccttgactatcaaagaccctgctgtgggctttctggaaaccatttcccctggatactctatccacacctatctctggagaagagattaatga

SEQ ID NO: 988 - protein, 536 aa, synthetic construct
  REGION 1..536: note = Variant of B-Glucocerebrosidase
MEFSSPSREECPKPLSRVSIMAGSLTGLLLLQAVSWASGARPCIPKSFGYSSVVCVCNATYCDSVDPLTLPALGTFSRYESTRSGRRMELSMGPIQANRTGTGLLLTLQPEQKFQKVKGFGGAMTDAAALNILALSPPAQNLLLKSYFSEEGIEYNIIRVPMASCDFSIRTYTYADTPDDFQLHNFSLPEEDTKLKIPLIHRALQLSQRPVSLFASPWTSPTWLKTNGALNGKGSLKGQPGDIYHQTWARYFVKFLDAYAEHKLQFWAVTAENEPSAGLLSGYPFQCLGFTPEHQRDFIARDLGPTLANSTHHNVRLLILDDQRLLLPHWAKVVLTDPEAAKYVHGIAVHWYLDFLAPAKWTLGETHRLFPNTTLFASEACVGSKFWEQSVRLGSWDRGMQYSHSIITNLLYHVVGWTDWNLALNPEGGPNWVRNFVDSPIIVDITKDTFYKQPMFYHLGHFSKFIPEGSTRVGLVASQKNDLDAVALLHPDGSAVVVVLNRSSKDVPLTIKDPAVGFLETISPGYSIHTYLWRRD

SEQ ID NO: 989 - DNA, 1614 bp, synthetic construct
  misc_feature 1..1614: note = Variant of B-Glucocerebrosidase
  source 1..1614: mol_type = other DNA
atggagttttcttctcctagtagagaagaatgccccaagccactgagcagggtgagcatcatggctggatccctcacagggctgcttcttttgcaggcagtctcatgggcctctggagccaggccctgtattcccaagtcattcggctactcctcagtggtgtgtgtatgcaatgccacctattgtgacagtctcgatcctctcactctccctgctctgggtaccttctcccggtatgagagcacaagaagtggaagacgcatggagctctcaatgggccctatacaggctaaccgcactgggacaggtctgctgctgaccctccaacctgaacagaagtttcagaaagtcaagggatttggaggagccatgactgatgcagcagcactcaacatcttggccctgtctccaccagcccagaacctgctgttgaagtcctacttctcagaggaggggattgagtacaacatcatccgggttcccatggctagctgtgacttctccattaggacctatacatacgctgacacccccgatgattttcagctccataatttcagtctccctgaagaagacaccaaatggaagatacctctgattcacagagccttgcaactgtcccaaaggccagtgagcctcttcgcttctccctggactagtcctacatggctgaagactaatggtgctctgaatgggaaaggctccctgaaaggacagccaggtgacatatatcatcagacatgggcccgctactttgtgaaattccttgatgcctatgcagagcacaagctccaattctgggcagtcaccgcagaaaacgagccctcagctgggctgctgtctggctacccctttcagtgcttgggctttactcctgagcatcaacgggacttcattgcccgggatttggggccaacactggccaacagcacccaccacaatgtaagactcctcattctggatgaccagaggctgctgctccctcattgggccaaggtggtgttgacagacccagaagctgccaaatatgttcatggcatcgctgtccactggtacctggattttttggcccctgcaaaggctactctgggagagacccacagactcttccccaataccatgctgtttgcatcagaagcctgcgtggggagcaaattctgggagcagtctgttaggctgggttcctgggatcggggcatgcaatattcccatagtataataactaacctcctctaccacgtggtaggatggacagactggaatctggctttgaacccagaaggaggccccaattgggtgcgcaactttgttgacagccccatcattgtggatatcacaaaggacaccttctacaaacagcctatgttctatcatctggggcactttagcaagttcattccagagggttcccagagagtaggcttggttgcctcacagaagaatgatctggatgctgtggcactcctgcatcctgacgggagtgcagtggtggtagtactgaacaggtctagcaaagatgttcccttgactatcaaagacccagctgtgggctttctggaaaccatttcccctggatactctatccacacctatctctggagaagacagtaatga

SEQ ID NO: 990 - protein, 536 aa, synthetic construct
  REGION 1..536: note = Variant of B-Glucocerebrosidase
MEFSSPSREECPKPLSRVSIMAGSLTGLLLLQAVSWASGARPCIPKSFGYSSVVCVCNATYCDSLDPLTLPALGTFSRYESTRSGRRMELSMGPIQANRTGTGLLLTLQPEQKFQKVKGFGGAMTDAAALNILALSPPAQNLLLKSYFSEEGIEYNIIRVPMASCDFSIRTYTYADTPDDFQLHNFSLPEEDTKWKIPLIHRALQLSQRPVSLFASPWTSPTWLKTNGALNGKGSLKGQPGDIYHQTWARYFVKFLDAYAEHKLQFWAVTAENEPSAGLLSGYPFQCLGFTPEHQRDFIARDLGPTLANSTHHNVRLLILDDQRLLLPHWAKVVLTDPEAAKYVHGIAVHWYLDFLAPAKATLGETHRLFPNTMLFASEACVGSKFWEQSVRLGSWDRGMQYSHSIITNLLYHVVGWTDWNLALNPEGGPNWVRNFVDSPIIVDITKDTFYKQPMFYHLGHFSKFIPEGSQRVGLVASQKNDLDAVALLHPDGSAVVVVLNRSSKDVPLTIKDPAVGFLETISPGYSIHTYLWRRQ

SEQ ID NO: 991 - DNA, 1614 bp, synthetic construct
  misc_feature 1..1614: note = Variant of B-Glucocerebrosidase
  source 1..1614: mol_type = other DNA
atggagttttcttctcctagtagagaagaatgccccaagccactgagcagggtgagcatcatggctggatccctcacagggctgcttcttttgcaggcagtctcatgggcctctggagccaggccctgtattcccaagtcattcggctactcctcagtggtgtgtgtatgcaatgccacctattgtgacagtctcgatcctctcactctccctgctctgggtaccttctcccggtatgagagcacaagaagtggaagacgcatggagctctcaatgggccctatacaggctaaccgcactgggacaggtctgctgctgaccctccaacctgaacagaagtttcagaaagtcaagggatttggaggagccatgactgatgcagcagcactcaacatcttggccctgtctccaccagcccagaacctgctgttgaagtcctacttctcagaggaggggattgagtacaacatcatccgggttcccatggctagctgtgacttctccattaggacctatacatacgctgacacccccgatgattttcagctccataatttcagtctccctgaagaagacaccaaactgaagatacctctgattcacagagccttgcaactgtcccaaaggccagtgagcctcttcgcttctccctggactagtcctacatggctgaagactaatggtgctctcaatgggggaggctccctgaaaggacagccaggtgacatatatcatcagacatgggcccgctactttgtgaaattccttgatgcctatgcagagcacaagctccaattctgggcagtcaccgcagaaaacgagccctcagctgggctgctgtctggctacccctttcagtgcttgggctttactcctgagcatcaacgggacttcattgcccgggatttggggccaacactggccaacagcacccaccacaatgtaagactcctcattctggatgaccagaggctgctgctccctcattgggccaaggtggtgttgacagacccagaagctgccaaatatgttcatggcatcgctgtccactggtacctggattttttggcccctgccaaggccactctgggagagacccacagactcttccccaataccatgctgtttgcatcagaagcctgcgtggggagcaaattctgggagcagtctgttaggctgggttcctgggatcggggcatgcaatattcccatagtataataactaacctcctctaccacgtggtaggatggacagactggaatctggctttgaacccagaaggaggccccaattgggtgcgcaactttgttgacagccccatcattgtggatatcacaaaggacaccttctacaaacagcctatgttctatcatctggggcactttagcaagttcattccagagggttcccagagagtaggcttggttgcctcacagaagaatgatctggatgctgtggcactcctgcatcctgacgggagtgcagtggtggtagtactgaacaggtctagcaaagatgttcccttgactatcaaagacccagctgtgggctttctggaaaccatttcccctggatactctatccacacctatctctggagaagacagtaatga

SEQ ID NO: 992 - protein, 536 aa, synthetic construct
  REGION 1..536: note = Variant of B-Glucocerebrosidase
MEFSSPSREECPKPLSRVSIMAGSLTGLLLLQAVSWASGARPCIPKSFGYSSVVCVCNATYCDSLDPLTLPALGTFSRYESTRSGRRMELSMGPIQANRTGTGLLLTLQPEQKFQKVKGFGGAMTDAAALNILALSPPAQNLLLKSYFSEEGIEYNIIRVPMASCDFSIRTYTYADTPDDFQLHNFSLPEEDTKLKIPLIHRALQLSQRPVSLFASPWTSPTWLKTNGALNGGGSLKGQPGDIYHQTWARYFVKFLDAYAEHKLQFWAVTAENEPSAGLLSGYPFQCLGFTPEHQRDFIARDLGPTLANSTHHNVRLLILDDQRLLLPHWAKVVLTDPEAAKYVHGIAVHWYLDFLAPAKATLGETHRLFPNTMLFASEACVGSKFWEQSVRLGSWDRGMQYSHSIITNLLYHVVGWTDWNLALNPEGGPNWVRNFVDSPIIVDITKDTFYKQPMFYHLGHFSKFIPEGSQRVGLVASQKNDLDAVALLHPDGSAVVVVLNRSSKDVPLTIKDPAVGFLETISPGYSIHTYLWRRQ

SEQ ID NO: 993 - DNA, 1614 bp, synthetic construct
  misc_feature 1..1614: note = Variant of B-Glucocerebrosidase
  source 1..1614: mol_type = other DNA
atggagttttcttctcctagtagagaagaatgccccaagccactgagcagggtgagcatcatggctggatccctcacagggctgcttcttttgcaggcagtctcatgggcctctggagccaggccctgtattcccaagtcattcggctactcctcagtggtgtgtgtatgcaatgccacctattgtgacagtctcgatcctctcactctccctgctctgggtaccttctcccgggttgagagcacaagaagtggaagacgcatggagctctcaatgggccctatacaggctaaccgcactgggacaggtctgctgctgaccctccaacctgaacagaagtttcagaaagtcaagggatttggaggagccatgactgatgcagcagcactcaacatcttggccctgtctccaccagcccagaacctgctgttgaagtcctacttctcagaggaggggattgagtacaacatcatccgggttcccatggctagctgtgacttctccattaggacctatacatacgctgacacccccgatgattttcagctccataatttcagtctccctgaagaagacaccaaactgaagatacctctgattcacagagccttgcaactgtcccaaaggccagtgagcctcttcgcttctccctggactagtcctacatggctgaagactaatggtgcttacaatgggaagggctccctgaaaggacagccaggtgacatatatcatcagacatgggcccgctactttgtgaaattccttgatgcctatgcagagcacaagctccaattctgggcagtcaccgcagaaaacgagccctcagctgggctgctgtctggctacccctttcagtgcttgggctttactcctgagcatcaacgggacttcattgcccgggatttggggccaacactggccaacagcacccaccacaatgtaagactcctcattctggatgaccagaggctgctgctccctcattgggccaaggtggtgttgacagacccagaagctgccaaatatgttcatggcatcgctgtccactggtacctggattttttggcccctcccaaggccactctgggagagacccacagactcttccccaataccacactgtttgcatcagaagcctgcgtggggagcaaattctgggagcagtctgttaggctgggttcctgggatcggggcatgcaatattcccatagtataataactaacctcctctaccacgtggtaggatggacagactggaatctggctttgaacccagaaggaggccccaattgggtgcgcaactttgttgacagccccatcattgtggatatcacaaaggacaccttctacaaacagcctatgttctatcatctggggcactttagcaagttcattccagagggttcccagagagtaggcttggttgcctcacagaagaatgatctggatgctgtggcactcctgcatcctgacgggagtgcagtggtggtagtactgaacaggtctagcaaagatgttcccttgactatcaaagaccctgctgtgggctttctggaaaccatttcccctggatactctatccacacctatctctggagaagacagtaatga

SEQ ID NO: 994 - protein, 536 aa, synthetic construct
  REGION 1..536: note = Variant of B-Glucocerebrosidase
MEFSSPSREECPKPLSRVSIMAGSLTGLLLLQAVSWASGARPCIPKSFGYSSVVCVCNATYCDSLDPLTLPALGTFSRVESTRSGRRMELSMGPIQANRTGTGLLLTLQPEQKFQKVKGFGGAMTDAAALNILALSPPAQNLLLKSYFSEEGIEYNIIRVPMASCDFSIRTYTYADTPDDFQLHNFSLPEEDTKLKIPLIHRALQLSQRPVSLFASPWTSPTWLKTNGAYNGKGSLKGQPGDIYHQTWARYFVKFLDAYAEHKLQFWAVTAENEPSAGLLSGYPFQCLGFTPEHQRDFIARDLGPTLANSTHHNVRLLILDDQRLLLPHWAKVVLTDPEAAKYVHGIAVHWYLDFLAPPKATLGETHRLFPNTTLFASEACVGSKFWEQSVRLGSWDRGMQYSHSIITNLLYHVVGWTDWNLALNPEGGPNWVRNFVDSPIIVDITKDTFYKQPMFYHLGHFSKFIPEGSQRVGLVASQKNDLDAVALLHPDGSAVVVVLNRSSKDVPLTIKDPAVGFLETISPGYSIHTYLWRRQ

SEQ ID NO: 995 - DNA, 1614 bp, synthetic construct
  misc_feature 1..1614: note = Variant of B-Glucocerebrosidase
  source 1..1614: mol_type = other DNA
atggagttttcttctcctagtagagaagaatgccccaagccactgagcagggtgagcatcatggctggatccctcacagggctgcttcttttgcaggcagtctcatgggcctctggagccaggccctgtattcccaagtcattcggctactcctcagtggtgtgtgtatgcaatgccacctattgtgacagtctcgatcctctcactctccctgctctgggtaccttctcccggtatgagagcacaagaagtggaagacgcatggagctctcaatgggccctatacaggctaaccgcactgggacaggtctgctgctgaccctccaacctgaacagaagtttcagaaagtcaagggatttggaggagccatgactgatgcagcagcactcaacatcttggccctgtctccaccagcccagaacctgctgttgaagtcctacttctcagaggaggggattgagtacaacatcatccgggttcccatggctagctgtgacttctccattaggacctatacatacgctgacacccccgatgattttcagctccataatttcagtctccctgaagaagacaccaaactgaagatacctctgattcacagagccttgcaactgtcccaaaggccagtgagcctcttcgcttctccctggactagtcctacatggctgaagactaatggtgctctgaatgggaaaggctccctgaaaggacagccaggtgacatatatcatcagacatgggcccgctactttgtgaaattccttgatgcctatgcagagcacaagctccaattctgggcagtcaccgcagaaaacgagccctcagctgggctgctgtctggctacccctttcagtgcttgggctttactcctgagcatcaacgggacttcattgcccgggatttggggccaacactggccaacagcacccaccacaatgtaagactcctcattctggatgaccagaggctgctgctccctcattgggccaaggtggtgttgacagacccagaagctgccaaatatgttcatggcatcgctgtccactggtacctggattttttggcccctgcaaaggctactctgggagagacccacagactcttccccaataccatgctgtttgcatcagaagcctgcgtggggagcaaattctgggagcagtctgttaggctgggttcctgggatcggggcatgcaatattcccatagtataataactaacctcctctaccacgtggtaggatggacagactggaatctggctttgaacccagaaggaggccccaattgggtgcgcaactttgttgacagccccatcattgtggatatcacaaaggacaccttctacaaacagcctatgttctatcatctggggcactttagcaagttcattccagagggttcccagagagtaggcttggttgcctcacagaagaatgatctggatgctgtggcactcctgcatcctgacgggagtgcagtggtggtagtactgaacaggtctagcaaagatgttcccttgactatcaaagaccctgctgtgggctttctggaaaccatttcccctggatactctatccacacctatctctggagaagagattaatga

SEQ ID NO: 996 - protein, 536 aa, synthetic construct
  REGION 1..536: note = Variant of B-Glucocerebrosidase
MEFSSPSREECPKPLSRVSIMAGSLTGLLLLQAVSWASGARPCIPKSFGYSSVVCVCNATYCDSLDPLTLPALGTFSRYESTRSGRRMELSMGPIQANRTGTGLLLTLQPEQKFQKVKGFGGAMTDAAALNILALSPPAQNLLLKSYFSEEGIEYNIIRVPMASCDFSIRTYTYADTPDDFQLHNFSLPEEDTKLKIPLIHRALQLSQRPVSLFASPWTSPTWLKTNGALNGKGSLKGQPGDIYHQTWARYFVKFLDAYAEHKLQFWAVTAENEPSAGLLSGYPFQCLGFTPEHQRDFIARDLGPTLANSTHHNVRLLILDDQRLLLPHWAKVVLTDPEAAKYVHGIAVHWYLDFLAPAKATLGETHRLFPNTMLFASEACVGSKFWEQSVRLGSWDRGMQYSHSIITNLLYHVVGWTDWNLALNPEGGPNWVRNFVDSPIIVDITKDTFYKQPMFYHLGHFSKFIPEGSQRVGLVASQKNDLDAVALLHPDGSAVVVVLNRSSKDVPLTIKDPAVGFLETISPGYSIHTYLWRRD

SEQ ID NO: 997 - DNA, 1614 bp, synthetic construct
  misc_feature 1..1614: note = Variant of B-Glucocerebrosidase
  source 1..1614: mol_type = other DNA
atggagttttcttctcctagtagagaagaatgccccaagccactgagcagggtgagcatcatggctggatccctcacagggctgcttcttttgcaggcagtctcatgggcctctggagccaggccctgtattcccaagtcattcggctactcctcagtggtgtgtgtatgcaatgccacctattgtgacagtctcgatcctctcactctccctgctctgggtaccttctcccggtatgagagcacaagaagtggaagacgcatggagctctcaatgggccctatacaggctaaccgcactgggacaggtctgctgctgaccctccaacctgaacagaagtttcagaaagtcaagggatttggaggagccatgactgatgcagcagcactcaacatcttggccctgtctccaccagcccagaacctgctgttgaagtcctacttctcagaggaggggattgagtacaacatcatccgggttcccatggctagctgtgacttctccattaggacctatacatacgctgacacccccgatgattttcagctccataatttcagtctccctgaagaagacaccaaactgaagatacctctgattcacagagccttgcaactgtcccaaaggccagtgagcctcttcgcttctccctggactagtcctacatggctgaagactaatggtgcttacaatgggaagggctccctgaaaggacagccaggtgacatatatcatcagacatgggcccgctactttgtgaaattccttgatgcctatgcagagcacaaactccaattctgggcagtcaccgcagaaaacgagccctcagctgggctgctgtctggctacccctttcagtgcttgggctttactcctgagcatcaacgggacttcattgcccgggatttggggccaacactggccaacagcacccaccacaatgtaagactcctcattctggatgaccagaggctgctgctccctcattgggccaaggtggtgttgacagacccagaagctgccaaatatgttcatggcatcgctgtccactggtacctggattttttggcccctcccaagtggactctgggagagacccacagactcttccccaataccacactgtttgcatcagaagcctgcgtggggagcaaattctgggagcagtctgttaggctgggttcctgggatcggggcatgcaatattcccatagtataataactaacctcctctaccacgtggtaggatggacagactggaatctggctttgaacccagaaggaggccccaattgggtgcgcaactttgttgacagccccatcattgtggatatcacaaaggacaccttctacaaacagcctatgttctatcatctggggcactttagcaagttcattccagagggttcccagagagtaggcttggttgcctcacagaagaatgatctggatgctgtggcactcctgcatcctgacgggagtgcagtggtggtagtactgaacaggtctagcaaagatgttcccttgactatcaaagacgaggctgtgggctttctggaaaccatttcccctggatactctatccacacctatctctggagaagacagtaatga

SEQ ID NO: 998 - protein, 536 aa, synthetic construct
  REGION 1..536: note = Variant of B-Glucocerebrosidase
MEFSSPSREECPKPLSRVSIMAGSLTGLLLLQAVSWASGARPCIPKSFGYSSVVCVCNATYCDSLDPLTLPALGTFSRYESTRSGRRMELSMGPIQANRTGTGLLLTLQPEQKFQKVKGFGGAMTDAAALNILALSPPAQNLLLKSYFSEEGIEYNIIRVPMASCDFSIRTYTYADTPDDFQLHNFSLPEEDTKLKIPLIHRALQLSQRPVSLFASPWTSPTWLKTNGAYNGKGSLKGQPGDIYHQTWARYFVKFLDAYAEHKLQFWAVTAENEPSAGLLSGYPFQCLGFTPEHQRDFIARDLGPTLANSTHHNVRLLILDDQRLLLPHWAKVVLTDPEAAKYVHGIAVHWYLDFLAPPKWTLGETHRLFPNTTLFASEACVGSKFWEQSVRLGSWDRGMQYSHSIITNLLYHVVGWTDWNLALNPEGGPNWVRNFVDSPIIVDITKDTFYKQPMFYHLGHFSKFIPEGSQRVGLVASQKNDLDAVALLHPDGSAVVVVLNRSSKDVPLTIKDEAVGFLETISPGYSIHTYLWRRQ

SEQ ID NO: 999 - DNA, 1614 bp, synthetic construct
  misc_feature 1..1614: note = Variant of B-Glucocerebrosidase
  source 1..1614: mol_type = other DNA
atggagttttcttctcctagtagagaagaatgccccaagccactgagcagggtgagcatcatggctggatccctcacagggctgcttcttttgcaggcagtctcatgggcctctggagccaggccctgtattcccaagtcattcggctactcctcagtggtgtgtgtatgcaatgccacctattgtgacagtgtcgatcctctcactctccctgctctgggtaccttctcccgggttgagagcacaagaagtggaagacgcatggagctctcaatgggccctatacaggctaaccgcactgggacaggtctgctgctgaccctccaacctgaacagaagtttcagaaagtcaagggatttggaggagccatgactgatgcagcagcactcaacatcttggccctgtctccaccagcccagaacctgctgttgaagtcctacttctcagaggaggggattgagtacaacatcatccgggttcccatggctagctgtgacttctccattaggacctatacatacgctgacacccccgatgattttcagctccataatttcagtctccctgaagaagacaccaaactgaagatacctctgattcacagagccttgcaactgtcccaaaggccagtgagcctcttcgcttctccctggactagtcctacatggctgaagactaatggtgcttacaatgggaagggctccctgaaaggacagccaggtgacatatatcatcagacatgggcccgctactttgtgaaattccttgatgcctatgcagagcacaagctccaattctgggcagtcaccgcagaaaacgagccctcagctgggctgctgtctggctacccctttcagtgcttgggctttactcctgagcatcaacgggacttcattgcccgggatttggggccaacactggccaacagcacccaccacaatgtaagactcctcattctggatgaccagaggctgctgctccctcattgggccaaggtggtgttgacagacccagaagctgccaaatatgttcatggcatcgctgtccactggtacctggattttttggcccctgcaaaggctactctgggagagacccacagactcttccccaataccatgctgtttgcatcagaagcctgcgtggggagcaaattctgggagcagtctgttaggctgggttcctgggatcggggcatgcaatattcccatagtataataactaacctcctctaccacgtggtaggatggacagactggaatctggctttgaacccagaaggaggccccaattgggtgcgcaactttgttgacagccccatcattgtggatatcacaaaggacaccttctacaaacagcctatgttctatcatctggggcactttagcaagttcattccagagggttcccagagagtaggcttggttgcctcacagaagaatgatctggatgctgtggcactcctgcatcctgacgggagtgcagtggtggtagtactgaacaggtctagcaaagatgttcccttgactatcaaagacccagctgtgggctttctggaaaccatttcccctggatactctatccacacctatctctggagaagacagtaatga

SEQ ID NO: 1000 - protein, 536 aa, synthetic construct
  REGION 1..536: note = Variant of B-Glucocerebrosidase
MEFSSPSREECPKPLSRVSIMAGSLTGLLLLQAVSWASGARPCIPKSFGYSSVVCVCNATYCDSVDPLTLPALGTFSRVESTRSGRRMELSMGPIQANRTGTGLLLTLQPEQKFQKVKGFGGAMTDAAALNILALSPPAQNLLLKSYFSEEGIEYNIIRVPMASCDFSIRTYTYADTPDDFQLHNFSLPEEDTKLKIPLIHRALQLSQRPVSLFASPWTSPTWLKTNGAYNGKGSLKGQPGDIYHQTWARYFVKFLDAYAEHKLQFWAVTAENEPSAGLLSGYPFQCLGFTPEHQRDFIARDLGPTLANSTHHNVRLLILDDQRLLLPHWAKVVLTDPEAAKYVHGIAVHWYLDFLAPAKATLGETHRLFPNTMLFASEACVGSKFWEQSVRLGSWDRGMQYSHSIITNLLYHVVGWTDWNLALNPEGGPNWVRNFVDSPIIVDITKDTFYKQPMFYHLGHFSKFIPEGSQRVGLVASQKNDLDAVALLHPDGSAVVVVLNRSSKDVPLTIKDPAVGFLETISPGYSIHTYLWRRQ

SEQ ID NO: 1001 - DNA, 1614 bp, synthetic construct
  misc_feature 1..1614: note = Variant of B-Glucocerebrosidase
  source 1..1614: mol_type = other DNA
atggagttttcttctcctagtagagaagaatgccccaagccactgagcagggtgagcatcatggctggatccctcacagggctgcttcttttgcaggcagtctcatgggcctctggagccaggccctgtattcccaagtcattcggctactcctcagtggtgtgtgtatgcaatgccacctattgtgacagtctcgatcctctcactctccctgctctgggtaccttctcccggtatgagagcacaagaagtggaagacgcatggagctctcaatgggccctatacaggctaaccgcactgggacaggtctgctgctgaccctccaacctgaacagaagtttcagaaagtcaagggatttggaggagccatgactgatgcagcagcactcaacatcttggccctgtctccaccagcccagaacctgctgttgaagtcctacttctcagaggaggggattgagtacaacatcatccgggttcccatggctagctgtgacttctccattaggacctatacatacgctgacacccccgatgattttcagctccataatttcagtctccctgaagaagacaccaaatggaagatacctctgattcacagagccttgcaactgtcccaaaggccagtgagcctcttcgcttctccctggactagtcctacatggctgaagactaatggtgctctcaatgggaagggctccctgaaaggacggccaggtgacatatatcatcagacatgggcccgctactttgtgaaattccttgatgcctatgcagagcacgggctccaattctgggcagtcaccgcagaaaacgagccctcagctgggctgctgtctggctacccctttcagtgcttgggctttactcctgagcatcaacgggacttcattgcccgggatttggggccaacactggccaacagcacccaccacaatgtaagactcctcattctggatgaccagaggctgctgctccctcattgggccaaggtggtgttgacagacccagaagctgccaaatatgttcatggcatcgctgtccactggtacctggattttttggcccctgccaagtggactctgggagagacccacagactcttccccaataccacactgtttgcatcagaagcctgcgtggggagcaaattctgggagcagtctgttaggctgggttcctgggatcggggcatgcaatattcccatagtataataactaacctcctctaccacgtggtaggatggacagactggaatctggctttgaacccagaaggaggccccaattgggtgcgcaactttgttgacagccccatcattgtggatatcacaaaggacaccttctacaaacagcctatgttctatcatctggggcactttagcaagttcattccagagggttcccagagagtaggcttggttgcctcacagaagaatgatctggatgctgtggcactcctgcatcctgacgggagtgcagtggtggtagtactgaacaggtctagcaaagatgttcccttgactatcaaagacgaggctgtgggctttctggaaaccatttcccctggatactctatccacacctatctctggagaagacagtaatga

SEQ ID NO: 1002 - protein, 536 aa, synthetic construct
  REGION 1..536: note = Variant of B-Glucocerebrosidase
MEFSSPSREECPKPLSRVSIMAGSLTGLLLLQAVSWASGARPCIPKSFGYSSVVCVCNATYCDSLDPLTLPALGTFSRYESTRSGRRMELSMGPIQANRTGTGLLLTLQPEQKFQKVKGFGGAMTDAAALNILALSPPAQNLLLKSYFSEEGIEYNIIRVPMASCDFSIRTYTYADTPDDFQLHNFSLPEEDTKWKIPLIHRALQLSQRPVSLFASPWTSPTWLKTNGALNGKGSLKGRPGDIYHQTWARYFVKFLDAYAEHGLQFWAVTAENEPSAGLLSGYPFQCLGFTPEHQRDFIARDLGPTLANSTHHNVRLLILDDQRLLLPHWAKVVLTDPEAAKYVHGIAVHWYLDFLAPAKWTLGETHRLFPNTTLFASEACVGSKFWEQSVRLGSWDRGMQYSHSIITNLLYHVVGWTDWNLALNPEGGPNWVRNFVDSPIIVDITKDTFYKQPMFYHLGHFSKFIPEGSQRVGLVASQKNDLDAVALLHPDGSAVVVVLNRSSKDVPLTIKDEAVGFLETISPGYSIHTYLWRRQ

SEQ ID NO: 1003 - DNA, 1614 bp, synthetic construct
  misc_feature 1..1614: note = Variant of B-Glucocerebrosidase
  source 1..1614: mol_type = other DNA
atggagttttcttctcctagtagagaagaatgccccaagccactgagcagggtgagcatcatggctggatccctcacagggctgcttcttttgcaggcagtctcatgggcctctggagccaggccctgtattcccaagtcattcggctactcctcagtggtgtgtgtatgcaatgccacctattgtgacagtctcgatcctctcactctccctgctctgggtaccttctcccggtatgagagcacaagaagtggaagacgcatggagctctcaatgggccctatacaggctaaccgcactgggacaggtctgctgctgaccctccaacctgaacagaagtttcagaaagtcaagggatttggaggagccatgactgatgcagcagcactcaacatcttggccctgtctccaccagcccagaacctgctgttgaagtcctacttctcagaggaggggattgagtacaacatcatccgggttcccatggctagctgtgacttctccattaggacctatacatacgctgacacccccgatgattttcagctccataatttcagtctccctgaagaagacaccaaatggaagatacctctgattcacagagccttgcaactgtcccaaaggccagtgagcctcttcgcttctccctggactagtcctacatggctgaagactaatggtgctctgaatgggaagggctccctgaaaggacagccaggtgacatatatcatcagacatgggcccgctactttgtgaaattccttgatgcctatgcagagcacgggctccaattctgggcagtcaccgcagaaaacgagccctcagctgggctgctgtctggctacccctttcagtgcttgggctttactcctgagcatcaacgggacttcattgcccgggatttggggccaacactggccaacagcacccaccacaatgtaagactcctcattctggatgaccagaggctgctgctccctcattgggccaaggtggtgttgacagacccagaagctgccaaatatgttcatggcatcgctgtccactggtacctggattttttggcccctgcaaaggctactctgggagagacccacagactcttccccaataccacactgtttgcatcagaagcctgcgtggggagcaaattctgggagcagtctgttaggctgggttcctgggatcggggcatgcaatattcccatagtataataactaacctcctctaccacgtggtaggatggacagactggaatctggctttgaacccagaaggaggccccaattgggtgcgcaactttgttgacagccccatcattgtggatatcacaaaggacaccttctacaaacagcctatgttctatcatctggggcactttagcaagttcattccagagggttcccagagagtaggcttggttgcctcacagaagaatgatctggatgctgtggcactcctgcatcctgacgggagtgcagtggtggtagtactgaacaggtctagcaaagatgttcccttgactatcaaagacccagctgtgggctttctggaaaccatttcccctggatactctatccacacctatctctggagaagacagtaatga

SEQ ID NO: 1004 - protein, 536 aa, synthetic construct
  REGION 1..536: note = Variant of B-Glucocerebrosidase
MEFSSPSREECPKPLSRVSIMAGSLTGLLLLQAVSWASGARPCIPKSFGYSSVVCVCNATYCDSLDPLTLPALGTFSRYESTRSGRRMELSMGPIQANRTGTGLLLTLQPEQKFQKVKGFGGAMTDAAALNILALSPPAQNLLLKSYFSEEGIEYNIIRVPMASCDFSIRTYTYADTPDDFQLHNFSLPEEDTKWKIPLIHRALQLSQRPVSLFASPWTSPTWLKTNGALNGKGSLKGQPGDIYHQTWARYFVKFLDAYAEHGLQFWAVTAENEPSAGLLSGYPFQCLGFTPEHQRDFIARDLGPTLANSTHHNVRLLILDDQRLLLPHWAKVVLTDPEAAKYVHGIAVHWYLDFLAPAKATLGETHRLFPNTTLFASEACVGSKFWEQSVRLGSWDRGMQYSHSIITNLLYHVVGWTDWNLALNPEGGPNWVRNFVDSPIIVDITKDTFYKQPMFYHLGHFSKFIPEGSQRVGLVASQKNDLDAVALLHPDGSAVVVVLNRSSKDVPLTIKDPAVGFLETISPGYSIHTYLWRRQ

SEQ ID NO: 1005 - DNA, 1614 bp, synthetic construct
  misc_feature 1..1614: note = Variant of B-Glucocerebrosidase
  source 1..1614: mol_type = other DNA
atggagttttcttctcctagtagagaagaatgccccaagccactgagcagggtgagcatcatggctggatccctcacagggctgcttcttttgcaggcagtctcatgggcctctggagccaggccctgtattcccaagtcattcggctactcctcagtggtgtgtgtatgcaatgccacctattgtgacagtctcgatcctctcactctccctgctctgggtaccttctcccggtatgagagcacaagaagtggaagacgcatggagctctcaatgggccctatacaggctaaccgcactgggacaggtctgctgctgaccctccaacctgaacagaagtttcagaaagtcaagggatttggaggagccatgactgatgcagcagcactcaacatcttggccctgtctccaccagcccagaacctgctgttgaagtcctacttctcagaggaggggattgagtacaacatcatccgggttcccatggctagctgtgacttctccattaggacctatacatacgctgacacccccgatgattttcagctccataatttcagtctccctgaagaagacaccaaatggaagatacctctgattcacagagccttgcaactgtcccaaaggccagtgagcctcttcgcttctccctggactagtcctacatggctgaagactaatggtgctctgaatgggaaaggctccctgaaaggacagccaggtgacatatatcatcagacatgggcccgctactttgtgaaattccttgatgcctatgcagagcacaagctccaattctgggcagtcaccgcagaaaacgagccctcagctgggctgctgtctggctacccctttcagtgcttgggctttactcctgagcatcaacgggacttcattgcccgggatttggggccaacactggccaacagcacccaccacaatgtaagactcctcattctggatgaccagaggctgctgctccctcattgggccaaggtggtgttgacagacccagaagctgccaaatatgttcatggcatcgctgtccactggtacctggattttttggcccctgccaaggccactctgggagagacccacagactcttccccaataccacactgtttgcatcagaagcctgcgtggggagcaaattctgggagcagtctgttaggctgggttcctgggatcggggcatgcaatattcccatagtataataactaacctcctctaccacgtggtaggatggacagactggaatctggctttgaacccagaaggaggccccaattgggtgcgcaactttgttgacagccccatcattgtggatatcacaaaggacaccttctacaaacagcctatgttctatcatctggggcactttagcaagttcattccagagggttcccagagagtaggcttggttgcctcacagaagaatgatctggatgctgtggcactcctgcatcctgacgggagtgcagtggtggtagtactgaacaggtctagcaaagatgttcccttgactatcaaagacccagctgtgggctttctggaaaccatttcccctggatactctatccacacctatctctggagaagacagtaatga

SEQ ID NO: 1006 - protein, 536 aa, synthetic construct
  REGION 1..536: note = Variant of B-Glucocerebrosidase
MEFSSPSREECPKPLSRVSIMAGSLTGLLLLQAVSWASGARPCIPKSFGYSSVVCVCNATYCDSLDPLTLPALGTFSRYESTRSGRRMELSMGPIQANRTGTGLLLTLQPEQKFQKVKGFGGAMTDAAALNILALSPPAQNLLLKSYFSEEGIEYNIIRVPMASCDFSIRTYTYADTPDDFQLHNFSLPEEDTKWKIPLIHRALQLSQRPVSLFASPWTSPTWLKTNGALNGKGSLKGQPGDIYHQTWARYFVKFLDAYAEHKLQFWAVTAENEPSAGLLSGYPFQCLGFTPEHQRDFIARDLGPTLANSTHHNVRLLILDDQRLLLPHWAKVVLTDPEAAKYVHGIAVHWYLDFLAPAKATLGETHRLFPNTTLFASEACVGSKFWEQSVRLGSWDRGMQYSHSIITNLLYHVVGWTDWNLALNPEGGPNWVRNFVDSPIIVDITKDTFYKQPMFYHLGHFSKFIPEGSQRVGLVASQKNDLDAVALLHPDGSAVVVVLNRSSKDVPLTIKDPAVGFLETISPGYSIHTYLWRRQ

SEQ ID NO: 1007 - DNA, 1614 bp, synthetic construct
  misc_feature 1..1614: note = Variant of B-Glucocerebrosidase
  source 1..1614: mol_type = other DNA
atggagttttcttctcctagtagagaagaatgccccaagccactgagcagggtgagcatcatggctggatccctcacagggctgcttcttttgcaggcagtctcatgggcctctggagccaggccctgtattcccaagtcattcggctactcctcagtggtgtgtgtatgcaatgccacctattgtgacagtgtcgatcctctcactctccctgctctgggtaccttctcccggtatgagagcacaagaagtggaagacgcatggagctctcaatgggccctatacaggctaaccgcactgggacaggtctgctgctgaccctccaacctgaacagaagtttcagaaagtcaagggatttggaggagccatgactgatgcagcagcactcaacatcttggccctgtctccaccagcccagaacctgctgttgaagtcctacttctcagaggaggggattgagtacaacatcatccgggttcccatggctagctgtgacttctccattaggacctatacatacgctgacacccccgatgattttcagctccataatttcagtctccctgaagaagacaccaaactgaagatacctctgattcacagagccttgcaactgtcccaaaggccagtgagcctcttcgcttctccctggactagtcctacatggctgaagactaatggtgcttacaatggggcaggctccctgaaaggacagccaggtgacatatatcatcagacatgggcccgctactttgtgaaattccttgatgcctatgcagagcacaagctccaattctgggcagtcaccgcagaaaacgagccctcagctgggctgctgtctggctacccctttcagtgcttgggctttactcctgagcatcaacgggacttcattgcccgggatttggggccaacactggccaacagcacccaccacaatgtaagactcctcattctggatgaccagaggctgctgctccctcattgggccaaggtggtgttgacagacccagaagctgccaaatatgttcatggcatcgctgtccactggtacctggattttttggcccctgccaagtggactctgggagagacccacagactcttccccaataccatgctgtttgcatcagaagcctgcgtggggagcaaattctgggagcagtctgttaggctgggttcctgggatcggggcatgcaatattcccatagtataataactaacctcctctaccacgtggtaggatggacagactggaatctggctttgaacccagaaggaggccccaattgggtgcgcaactttgttgacagccccatcattgtggatatcacaaaggacaccttctacaaacagcctatgttctatcatctggggcactttagcaagttcattccagagggttcccagagagtaggcttggttgcctcacagaagaatgatctggatgctgtggcactcctgcatcctgacgggagtgcagtggtggtagtactgaacaggtctagcaaagatgttcccttgactatcaaagacccagctgtgggctttctggaaaccatttcccctggatactctatccacacctatctctggagaagactgtaatga

SEQ ID NO: 1008 - protein, 536 aa, synthetic construct
  REGION 1..536: note = Variant of B-Glucocerebrosidase
MEFSSPSREECPKPLSRVSIMAGSLTGLLLLQAVSWASGARPCIPKSFGYSSVVCVCNATYCDSVDPLTLPALGTFSRYESTRSGRRMELSMGPIQANRTGTGLLLTLQPEQKFQKVKGFGGAMTDAAALNILALSPPAQNLLLKSYFSEEGIEYNIIRVPMASCDFSIRTYTYADTPDDFQLHNFSLPEEDTKLKIPLIHRALQLSQRPVSLFASPWTSPTWLKTNGAYNGAGSLKGQPGDIYHQTWARYFVKFLDAYAEHKLQFWAVTAENEPSAGLLSGYPFQCLGFTPEHQRDFIARDLGPTLANSTHHNVRLLILDDQRLLLPHWAKVVLTDPEAAKYVHGIAVHWYLDFLAPAKWTLGETHRLFPNTMLFASEACVGSKFWEQSVRLGSWDRGMQYSHSIITNLLYHVVGWTDWNLALNPEGGPNWVRNFVDSPIIVDITKDTFYKQPMFYHLGHFSKFIPEGSQRVGLVASQKNDLDAVALLHPDGSAVVVVLNRSSKDVPLTIKDPAVGFLETISPGYSIHTYLWRRL

SEQ ID NO: 1009 - DNA, 1614 bp, synthetic construct
  misc_feature 1..1614: note = Variant of B-Glucocerebrosidase
  source 1..1614: mol_type = other DNA
atggagttttcttctcctagtagagaagaatgccccaagccactgagcagggtgagcatcatggctggatccctcacagggctgcttcttttgcaggcagtctcatgggcctctggagccaggccctgtattcccaagtcattcggctactcctcagtggtgtgtgtatgcaatgccacctattgtgacagtctcgatcctctcactctccctgctctgggtaccttctcccggtatgagagcacaagaagtggaagacgcatggagctctcaatgggccctatacaggctaaccgcactgggacaggtctgctgctgaccctccaacctgaacagaagtttcagaaagtcaagggatttggaggagccatgactgatgcagcagcactcaacatcttggccctgtctccaccagcccagaacctgctgttgaagtcctacttctcagaggaggggattgagtacaacatcatccgggttcccatggctagctgtgacttctccattaggacctatacatacgctgacacccccgatgattttcagctccataatttcagtctccctgaagaagacaccaaactgaagatacctctgattcacagagccttgcaactgtcccaaaggccagtgagcctcttcgcttctccctggactagtcctacatggctgaagactaatggtgcttacaatggggcaggctccctgaaaggacagccaggtgacatatatcatcagacatgggcccgctactttgtgaaattccttgatgcctatgcagagcacaaactccaattctgggcagtcaccgcagaaaacgagccctcagctgggctgctgtctggctacccctttcagtgcttgggctttactcctgagcatcaacgggacttcattgcccgggatttggggccaacactggccaacagcacccaccacaatgtaagactcctcattctggatgaccagaggctgctgctccctcattgggccaaggtggtgttgacagacccagaagctgccaaatatgttcatggcatcgctgtccactggtacctggattttttggcccctgcaaaggctactctgggagagacccacagactcttccccaataccacactgtttgcatcagaagcctgcgtggggagcaaattctgggagcagtctgttaggctgggttcctgggatcggggcatgcaatattcccatagtataataactaacctcctctaccacgtggtaggatggacagactggaatctggctttgaacccagaaggaggccccaattgggtgcgcaactttgttgacagccccatcattgtggatatcacaaaggacaccttctacaaacagcctatgttctatcatctggggcactttagcaagttcattccagagggttccactagagtaggcttggttgcctcacagaagaatgatctggatgctgtggcactcctgcatcctgacgggagtgcagtggtggtagtactgaacaggtctagcaaagatgttcccttgactatcaaagacccagctgtgggctttctggaaaccatttcccctggatactctatccacacctatctctggagaagacagtaatga

SEQ ID NO: 1010 - protein, 536 aa, synthetic construct
  REGION 1..536: note = Variant of B-Glucocerebrosidase
MEFSSPSREECPKPLSRVSIMAGSLTGLLLLQAVSWASGARPCIPKSFGYSSVVCVCNATYCDSLDPLTLPALGTFSRYESTRSGRRMELSMGPIQANRTGTGLLLTLQPEQKFQKVKGFGGAMTDAAALNILALSPPAQNLLLKSYFSEEGIEYNIIRVPMASCDFSIRTYTYADTPDDFQLHNFSLPEEDTKLKIPLIHRALQLSQRPVSLFASPWTSPTWLKTNGAYNGAGSLKGQPGDIYHQTWARYFVKFLDAYAEHKLQFWAVTAENEPSAGLLSGYPFQCLGFTPEHQRDFIARDLGPTLANSTHHNVRLLILDDQRLLLPHWAKVVLTDPEAAKYVHGIAVHWYLDFLAPAKATLGETHRLFPNTTLFASEACVGSKFWEQSVRLGSWDRGMQYSHSIITNLLYHVVGWTDWNLALNPEGGPNWVRNFVDSPIIVDITKDTFYKQPMFYHLGHFSKFIPEGSTRVGLVASQKNDLDAVALLHPDGSAVVVVLNRSSKDVPLTIKDPAVGFLETISPGYSIHTYLWRRQ

SEQ ID NO: 1011 - DNA, 1614 bp, synthetic construct
  misc_feature 1..1614: note = Variant of B-Glucocerebrosidase
  source 1..1614: mol_type = other DNA
atggagttttcttctcctagtagagaagaatgccccaagccactgagcagggtgagcatcatggctggatccctcacagggctgcttcttttgcaggcagtctcatgggcctctggagccaggccctgtattcccaagtcattcggctactcctcagtggtgtgtgtatgcaatgccacctattgtgacagtgtcgatcctctcactctccctgctctgggtaccttctcccggtatgagagcacaagaagtggaagacgcatggagctctcaatgggccctatacaggctaaccgcactgggacaggtctgctgctgaccctccaacctgaacagaagtttcagaaagtcaagggatttggaggagccatgactgatgcagcagcactcaacatcttggccctgtctccaccagcccagaacctgctgttgaagtcctacttctcagaggaggggattgagtacaacatcatccgggttcccatggctagctgtgacttctccattaggacctatacatacgctgacacccccgatgattttcagctccataatttcagtctccctgaagaagacaccaaactgaagatacctctgattcacagagccttgcaactgtcccaaaggccagtgagcctcttcgcttctccctggactagtcctacatggctgaagactaatggtgctctcaatggggcaggctccctgaaaggacagccaggtgacatatatcatcagacatgggcccgctactttgtgaaattccttgatgcctatgcagagcacaagctccaattctgggcagtcaccgcagaaaacgagccctcagctgggctgctgtctggctacccctttcagtgcttgggctttactcctgagcatcaacgggacttcattgcccgggatttggggccaacactggccaacagcacccaccacaatgtaagactcctcattctggatgaccagaggctgctgctccctcattgggccaaggtggtgttgacagacccagaagctgccaaatatgttcatggcatcgctgtccactggtacctggattttttggcccctcccaagtggactctgggagagacccacagactcttccccaataccatgctgtttgcatcagaagcctgcgtggggagcaaattctgggagcagtctgttaggctgggttcctgggatcggggcatgcaatattcccatagtataataactaacctcctctaccacgtggtaggatggacagactggaatctggctttgaacccagaaggaggccccaattgggtgcgcaactttgttgacagccccatcattgtggatatcacaaaggacaccttctacaaacagcctatgttctatcatctggggcactttagcaagttcattccagagggttccactagagtaggcttggttgcctcacagaagaatgatctggatgctgtggcactcctgcatcctgacgggagtgcagtggtggtagtactgaacaggtctagcaaagatgttcccttgactatcaaagacccagctgtgggctttctggaaaccatttcccctggatactctatccacacctatctctggagaagacagtaatga

SEQ ID NO: 1012 - protein, 536 aa, synthetic construct
  REGION 1..536: note = Variant of B-Glucocerebrosidase
MEFSSPSREECPKPLSRVSIMAGSLTGLLLLQAVSWASGARPCIPKSFGYSSVVCVCNATYCDSVDPLTLPALGTFSRYESTRSGRRMELSMGPIQANRTGTGLLLTLQPEQKFQKVKGFGGAMTDAAALNILALSPPAQNLLLKSYFSEEGIEYNIIRVPMASCDFSIRTYTYADTPDDFQLHNFSLPEEDTKLKIPLIHRALQLSQRPVSLFASPWTSPTWLKTNGALNGAGSLKGQPGDIYHQTWARYFVKFLDAYAEHKLQFWAVTAENEPSAGLLSGYPFQCLGFTPEHQRDFIARDLGPTLANSTHHNVRLLILDDQRLLLPHWAKVVLTDPEAAKYVHGIAVHWYLDFLAPPKWTLGETHRLFPNTMLFASEACVGSKFWEQSVRLGSWDRGMQYSHSIITNLLYHVVGWTDWNLALNPEGGPNWVRNFVDSPIIVDITKDTFYKQPMFYHLGHFSKFIPEGSTRVGLVASQKNDLDAVALLHPDGSAVVVVLNRSSKDVPLTIKDPAVGFLETISPGYSIHTYLWRRQ

SEQ ID NO: 1013 - DNA, 1614 bp, synthetic construct
  misc_feature 1..1614: note = Variant of B-Glucocerebrosidase
  source 1..1614: mol_type = other DNA
atggagttttcttctcctagtagagaagaatgccccaagccactgagcagggtgagcatcatggctggatccctcacagggctgcttcttttgcaggcagtctcatgggcctctggagccaggccctgtattcccaagtcattcggctactcctcagtggtgtgtgtatgcaatgccacctattgtgacagtctcgatcctctcactctccctgctctgggtaccttctcccggtatgagagcacaagaagtggaagacgcatggagctctcaatgggccctatacaggctaaccgcactgggacaggtctgctgctgaccctccaacctgaacagaagtttcagaaagtcaagggatttggaggagccatgactgatgcagcagcactcaacatcttggccctgtctccaccagcccagaacctgctgttgaagtcctacttctcagaggaggggattgagtacaacatcatccgggttcccatggctagctgtgacttctccattaggacctatacatacgctgacacccccgatgattttcagctccataatttcagtctccctgaagaagacaccaaactgaagatacctctgattcacagagccttgcaactgtcccaaaggccagtgagcctcttcgcttctccctggactagtcctacatggctgaagactaatggtgctctgaatgggaaaggctccctgaaaggacagccaggtgacatatatcatcagacatgggcccgctactttgtgaaattccttgatgcctatgcagagcacaagctccaattctgggcagtcaccgcagaaaacgagccctcagctgggctgctgtctggctacccctttcagtgcttgggctttactcctgagcatcaacgggacttcattgcccgggatttggggccaacactggccaacagcacccaccacaatgtaagactcctcattctggatgaccagaggctgctgctccctcattgggccaaggtggtgttgacagacccagaagctgccaaatatgttcatggcatcgctgtccactggtacctggattttttggcccctgcaaaggctactctgggagagacccacagactcttccccaataccatgctgtttgcatcagaagcctgcgtggggagcaaattctgggagcagtctgttaggctgggttcctgggatcggggcatgcaatattcccatagtataataactaacctcctctaccacgtggtaggatggacagactggaatctggctttgaacccagaaggaggccccaattgggtgcgcaactttgttgacagccccatcattgtggatatcacaaaggacaccttctacaaacagcctatgttctatcatctggggcactttagcaagttcattccagagggttcccagagagtaggcttggttgcctcacagaagaatgatctggatgctgtggcactcctgcatcctgacgggagtgcagtggtggtagtactgaacaggtctagcaaagatgttcccttgactatcaaagaccctgctgtgggctttctggaaaccatttcccctggatactctatccacacctatctctggagaagactgtaatga

SEQ ID NO: 1014 - protein, 536 aa, synthetic construct
  REGION 1..536: note = Variant of B-Glucocerebrosidase
MEFSSPSREECPKPLSRVSIMAGSLTGLLLLQAVSWASGARPCIPKSFGYSSVVCVCNATYCDSLDPLTLPALGTFSRYESTRSGRRMELSMGPIQANRTGTGLLLTLQPEQKFQKVKGFGGAMTDAAALNILALSPPAQNLLLKSYFSEEGIEYNIIRVPMASCDFSIRTYTYADTPDDFQLHNFSLPEEDTKLKIPLIHRALQLSQRPVSLFASPWTSPTWLKTNGALNGKGSLKGQPGDIYHQTWARYFVKFLDAYAEHKLQFWAVTAENEPSAGLLSGYPFQCLGFTPEHQRDFIARDLGPTLANSTHHNVRLLILDDQRLLLPHWAKVVLTDPEAAKYVHGIAVHWYLDFLAPAKATLGETHRLFPNTMLFASEACVGSKFWEQSVRLGSWDRGMQYSHSIITNLLYHVVGWTDWNLALNPEGGPNWVRNFVDSPIIVDITKDTFYKQPMFYHLGHFSKFIPEGSQRVGLVASQKNDLDAVALLHPDGSAVVVVLNRSSKDVPLTIKDPAVGFLETISPGYSIHTYLWRRL

SEQ ID NO: 1015 - DNA, 1614 bp, synthetic construct
  misc_feature 1..1614: note = Variant of B-Glucocerebrosidase
  source 1..1614: mol_type = other DNA
atggagttttcttctcctagtagagaagaatgccccaagccactgagcagggtgagcatcatggctggatccctcacagggctgcttcttttgcaggcagtctcatgggcctctggagccaggccctgtattcccaagtcattcggctactcctcagtggtgtgtgtatgcaatgccacctattgtgacagtgtcgatcctctcactctccctgctctgggtaccttctcccggtatgagagcacaagaagtggaagacgcatggagctctcaatgggccctatacaggctaaccgcactgggacaggtctgctgctgaccctccaacctgaacagaagtttcagaaagtcaagggatttggaggagccatgactgatgcagcagcactcaacatcttggccctgtctccaccagcccagaacctgctgttgaagtcctacttctcagaggaggggattgagtacaacatcatccgggttcccatggctagctgtgacttctccattaggacctatacatacgctgacacccccgatgattttcagctccataatttcagtctccctgaagaagacaccaaactgaagatacctctgattcacagagccttgcaactgtcccaaaggccagtgagcctcttcgcttctccctggactagtcctacatggctgaagactaatggtgctctcaatgggaagggctccctgaaaggacagccaggtgacatatatcatcagacatgggcccgctactttgtgaaattccttgatgcctatgcagagcacaaactccaattctgggcagtcaccgcagaaaacgagccctcagctgggctgctgtctggctacccctttcagtgcttgggctttactcctgagcatcaacgggacttcattgcccgggatttggggccaacactggccaacagcacccaccacaatgtaagactcctcattctggatgaccagaggctgctgctccctcattgggccaaggtggtgttgacagacccagaagctgccaaatatgttcatggcatcgctgtccactggtacctggattttttggcccctcccaaggccactctgggagagacccacagactcttccccaataccatgctgtttgcatcagaagcctgcgtggggagcaaattctgggagcagtctgttaggctgggttcctgggatcggggcatgcaatattcccatagtataataactaacctcctctaccacgtggtaggatggacagactggaatctggctttgaacccagaaggaggccccaattgggtgcgcaactttgttgacagccccatcattgtggatatcacaaaggacaccttctacaaacagcctatgttctatcatctggggcactttagcaagttcattccagagggttccactagagtaggcttggttgcctcacagaagaatgatctggatgctgtggcactcctgcatcctgacgggagtgcagtggtggtagtactgaacaggtctagcaaagatgttcccttgactatcaaagacccagctgtgggctttctggaaaccatttcccctggatactctatccacacctatctctggagaagacagtaatga

SEQ ID NO: 1016 - protein, 536 aa, synthetic construct
  REGION 1..536: note = Variant of B-Glucocerebrosidase
MEFSSPSREECPKPLSRVSIMAGSLTGLLLLQAVSWASGARPCIPKSFGYSSVVCVCNATYCDSVDPLTLPALGTFSRYESTRSGRRMELSMGPIQANRTGTGLLLTLQPEQKFQKVKGFGGAMTDAAALNILALSPPAQNLLLKSYFSEEGIEYNIIRVPMASCDFSIRTYTYADTPDDFQLHNFSLPEEDTKLKIPLIHRALQLSQRPVSLFASPWTSPTWLKTNGALNGKGSLKGQPGDIYHQTWARYFVKFLDAYAEHKLQFWAVTAENEPSAGLLSGYPFQCLGFTPEHQRDFIARDLGPTLANSTHHNVRLLILDDQRLLLPHWAKVVLTDPEAAKYVHGIAVHWYLDFLAPPKATLGETHRLFPNTMLFASEACVGSKFWEQSVRLGSWDRGMQYSHSIITNLLYHVVGWTDWNLALNPEGGPNWVRNFVDSPIIVDITKDTFYKQPMFYHLGHFSKFIPEGSTRVGLVASQKNDLDAVALLHPDGSAVVVVLNRSSKDVPLTIKDPAVGFLETISPGYSIHTYLWRRQ

SEQ ID NO: 1017 - DNA, 1614 bp, synthetic construct
  misc_feature 1..1614: note = Variant of B-Glucocerebrosidase
  source 1..1614: mol_type = other DNA
atggagttttcttctcctagtagagaagaatgccccaagccactgagcagggtgagcatcatggctggatccctcacagggctgcttcttttgcaggcagtctcatgggcctctggagccaggccctgtattcccaagtcattcggctactcctcagtggtgtgtgtatgcaatgccacctattgtgacagtgtcgatcctctcactctccctgctctgggtaccttctcccgggttgagagcacaagaagtggaagacgcatggagctctcaatgggccctatacaggctaaccgcactgggacaggtctgctgctgaccctccaacctgaacagaagtttcagaaagtcaagggatttggaggagccatgactgatgcagcagcactcaacatcttggccctgtctccaccagcccagaacctgctgttgaagtcctacttctcagaggaggggattgagtacaacatcatccgggttcccatggctagctgtgacttctccattaggacctatacatacgctgacacccccgatgattttcagctccataatttcagtctccctgaagaagacaccaaactgaagatacctctgattcacagagccttgcaactgtcccaaaggccagtgagcctcttcgcttctccctggactagtcctacatggctgaagactaatggtgctctgaatgggaaaggctccctgaaaggacagccaggtgacatatatcatcagacatgggcccgctactttgtgaaattccttgatgcctatgcagagcacaagctccaattctgggcagtcaccgcagaaaacgagccctcagctgggctgctgtctggctacccctttcagtgcttgggctttactcctgagcatcaacgggacttcattgcccgggatttggggccaacactggccaacagcacccaccacaatgtaagactcctcattctggatgaccagaggctgctgctccctcattgggccaaggtggtgttgacagacccagaagctgccaaatatgttcatggcatcgctgtccactggtacctggattttttggcccctgccaaggccactctgggagagacccacagactcttccccaataccatgctgtttgcatcagaagcctgcgtggggagcaaattctgggagcagtctgttaggctgggttcctgggatcggggcatgcaatattcccatagtataataactaacctcctctaccacgtggtaggatggacagactggaatctggctttgaacccagaaggaggccccaattgggtgcgcaactttgttgacagccccatcattgtggatatcacaaaggacaccttctacaaacagcctatgttctatcatctggggcactttagcaagttcattccagagggttcccagagagtaggcttggttgcctcacagaagaatgatctggatgctgtggcactcctgcatcctgacgggagtgcagtggtggtagtactgaacaggtctagcaaagatgttcccttgactatcaaagacccagctgtgggctttctggaaaccatttcccctggatactctatccacacctatctctggagaagacagtaatga

SEQ ID NO: 1018 - protein, 536 aa, synthetic construct
  REGION 1..536: note = Variant of B-Glucocerebrosidase
MEFSSPSREECPKPLSRVSIMAGSLTGLLLLQAVSWASGARPCIPKSFGYSSVVCVCNATYCDSVDPLTLPALGTFSRVESTRSGRRMELSMGPIQANRTGTGLLLTLQPEQKFQKVKGFGGAMTDAAALNILALSPPAQNLLLKSYFSEEGIEYNIIRVPMASCDFSIRTYTYADTPDDFQLHNFSLPEEDTKLKIPLIHRALQLSQRPVSLFASPWTSPTWLKTNGALNGKGSLKGQPGDIYHQTWARYFVKFLDAYAEHKLQFWAVTAENEPSAGLLSGYPFQCLGFTPEHQRDFIARDLGPTLANSTHHNVRLLILDDQRLLLPHWAKVVLTDPEAAKYVHGIAVHWYLDFLAPAKATLGETHRLFPNTMLFASEACVGSKFWEQSVRLGSWDRGMQYSHSIITNLLYHVVGWTDWNLALNPEGGPNWVRNFVDSPIIVDITKDTFYKQPMFYHLGHFSKFIPEGSQRVGLVASQKNDLDAVALLHPDGSAVVVVLNRSSKDVPLTIKDPAVGFLETISPGYSIHTYLWRRQ

SEQ ID NO: 1019 - DNA, 1614 bp, synthetic construct
  misc_feature 1..1614: note = Variant of B-Glucocerebrosidase
  source 1..1614: mol_type = other DNA
atggagttttcttctcctagtagagaagaatgccccaagccactgagcagggtgagcatcatggctggatccctcacagggctgcttcttttgcaggcagtctcatgggcctctggagccaggccctgtattcccaagtcattcggctactcctcagtggtgtgtgtatgcaatgccacctattgtgacagtgtcgatcctctcactctccctgctctgggtaccttctcccggtatgagagcacaagaagtggaagacgcatggagctctcaatgggccctatacaggctaaccgcactgggacaggtctgctgctgaccctccaacctgaacagaagtttcagaaagtcaagggatttggaggagccatgactgatgcagcagcactcaacatcttggccctgtctccaccagcccagaacctgctgttgaagtcctacttctcagaggaggggattgagtacaacatcatccgggttcccatggctagctgtgacttctccattaggacctatacatacgctgacacccccgatgattttcagctccataatttcagtctccctgaagaagacaccaaactgaagatacctctgattcacagagccttgcaactgtcccaaaggccagtgagcctcttcgcttctccctggactagtcctacatggctgaagactaatggtgctctcaatgggaagggctccctgaaaggacagccaggtgacatatatcatcagacatgggcccgctactttgtgaaattccttgatgcctatgcagagcacaagctccaattctgggcagtcaccgcagaaaacgagccctcagctgggctgctgtctggctacccctttcagtgcttgggctttactcctgagcatcaacgggacttcattgcccgggatttggggccaacactggccaacagcacccaccacaatgtaagactcctcattctggatgaccagaggctgctgctccctcattgggccaaggtggtgttgacagacccagaagctgccaaatatgttcatggcatcgctgtccactggtacctggattttttggcccctcccaaggccactctgggagagacccacagactcttccccaataccatgctgtttgcatcagaagcctgcgtggggagcaaattctgggagcagtctgttaggctgggttcctgggatcggggcatgcaatattcccatagtataataactaacctcctctaccacgtggtaggatggacagactggaatctggctttgaacccagaaggaggccccaattgggtgcgcaactttgttgacagccccatcattgtggatatcacaaaggacaccttctacaaacagcctatgttctatcatctggggcactttagcaagttcattccagagggttcccagagagtaggcttggttgcctcacagaagaatgatctggatgctgtggcactcctgcatcctgacgggagtgcagtggtggtagtactgaacaggtctagcaaagatgttcccttgactatcaaagaccctgctgtgggctttctggaaaccatttcccctggatactctatccacacctatctctggagaagacagtaatga

SEQ ID NO: 1020 - protein, 536 aa, synthetic construct
  REGION 1..536: note = Variant of B-Glucocerebrosidase
MEFSSPSREECPKPLSRVSIMAGSLTGLLLLQAVSWASGARPCIPKSFGYSSVVCVCNATYCDSVDPLTLPALGTFSRYESTRSGRRMELSMGPIQANRTGTGLLLTLQPEQKFQKVKGFGGAMTDAAALNILALSPPAQNLLLKSYFSEEGIEYNIIRVPMASCDFSIRTYTYADTPDDFQLHNFSLPEEDTKLKIPLIHRALQLSQRPVSLFASPWTSPTWLKTNGALNGKGSLKGQPGDIYHQTWARYFVKFLDAYAEHKLQFWAVTAENEPSAGLLSGYPFQCLGFTPEHQRDFIARDLGPTLANSTHHNVRLLILDDQRLLLPHWAKVVLTDPEAAKYVHGIAVHWYLDFLAPPKATLGETHRLFPNTMLFASEACVGSKFWEQSVRLGSWDRGMQYSHSIITNLLYHVVGWTDWNLALNPEGGPNWVRNFVDSPIIVDITKDTFYKQPMFYHLGHFSKFIPEGSQRVGLVASQKNDLDAVALLHPDGSAVVVVLNRSSKDVPLTIKDPAVGFLETISPGYSIHTYLWRRQ

SEQ ID NO: 1021 - DNA, 1608 bp, synthetic construct
  misc_feature 1..1608: note = Variant of B-Glucocerebrosidase
  source 1..1608: mol_type = other DNA
atggagttttcttctcctagtagagaagaatgccccaagccactgagcagggtgagcatcatggctggatccctcacagggctgcttcttttgcaggcagtctcatgggcctctggagccaggccctgtattcccaagtcattcggctactcctcagtggtgtgtgtatgcaatgccacctattgtgacagtgtcgatcctctcactctccctgctctgggtaccttctcccggtatgagagcacaagaagcggaagacgcatggagctctcaatgggccctatacaggctaaccgcactgggacaggtctgctgctgaccctccaacctgaacagaagtttcagaaagtcaagggatttggaggagccatgactgatgcagcagcactcaacatcttggccctgtctccaccagcccagaacctgctgttgaagtcctacttctcagaggaggggattgagtacaacatcatccgggttcccatggctagctgtgacttctccattaggacctatacatacgctgacacccccgatgattttcaactccataatttcagtctccctgaagaagacaccaaatggaagatacctctgattcacagagccttgcaactgtcccaaaggccagtgagcctcttcgcttctccctggactagtcctacatggctgaagactaatggtgcttacaatgggaagggctccctgaaaggacagccaggtgacatatatcatcagacatgggcccgctactttgtgaaattccttgatgcctatgcagagcacgggctccaattctgggcagtcaccgcagaaaacgagccctcagctgggctgctgtctggctacccctttcagtgcttgggctttactcctgagcatcaacgggacttcattgcccgggatttggggccaacactggccaacagcacccaccacaatgtaagactcctcattctggatgaccagaggctgctgctccctcattgggccaaggtggtgttgacaaacccagaagctgccaaatatgttcatggcatcgctgtccactggtacctggattttttggcccctccaaagtggactctgggagagacccacagactcttccccaataccacactgtttgcatcagaagcctgcgtggggagcaaattctgggagcagtctgttaggctgggttcctgggatcggggcatgcaatattcccatagtataataactaacctcctctaccacgtggtaggatggacagactggaatctggctttgaacccagaaggaggccccaattgggtgcgcaactttgttgacagccccatcattgtggatatcacaaaggacaccttctacaaacagcctatgttctatcatctggggcactttagcaagttcattccagagggttccactagagtaggcttggttgcctcacagaagaatgatctggatgctgtggcactcctgcatcctgacgggagtgcagtggtggtagtactgaacaggtctagcaaagatgttcccttgactatcaaagacccagctgtgggctttctggaaaccatttcccctggatactctatccacacctatctctggagaagacag

SEQ ID NO: 1022 - protein, 536 aa, synthetic construct
  REGION 1..536: note = Variant of B-Glucocerebrosidase
MEFSSPSREECPKPLSRVSIMAGSLTGLLLLQAVSWASGARPCIPKSFGYSSVVCVCNATYCDSVDPLTLPALGTFSRYESTRSGRRMELSMGPIQANRTGTGLLLTLQPEQKFQKVKGFGGAMTDAAALNILALSPPAQNLLLKSYFSEEGIEYNIIRVPMASCDFSIRTYTYADTPDDFQLHNFSLPEEDTKWKIPLIHRALQLSQRPVSLFASPWTSPTWLKTNGAYNGKGSLKGQPGDIYHQTWARYFVKFLDAYAEHGLQFWAVTAENEPSAGLLSGYPFQCLGFTPEHQRDFIARDLGPTLANSTHHNVRLLILDDQRLLLPHWAKVVLTNPEAAKYVHGIAVHWYLDFLAPPKWTLGETHRLFPNTTLFASEACVGSKFWEQSVRLGSWDRGMQYSHSIITNLLYHVVGWTDWNLALNPEGGPNWVRNFVDSPIIVDITKDTFYKQPMFYHLGHFSKFIPEGSTRVGLVASQKNDLDAVALLHPDGSAVVVVLNRSSKDVPLTIKDPAVGFLETISPGYSIHTYLWRRQ

SEQ ID NO: 1023 - DNA, 1608 bp, synthetic construct
  misc_feature 1..1608: note = Variant of B-Glucocerebrosidase
  source 1..1608: mol_type = other DNA
atggagttttcttctcctagtagagaagaatgccccaagccactgagcagggtgagcatcatggctggatccctcacagggctgcttcttttgcaggcagtctcatgggcctctggagccaggccctgtattcccaagtcattcggctactcctcagtggtgtgtgtatgcaatgccacctattgtgacagtgtcgatcctctcactctccctgctctgggtaccttctcccgggtggagagcacaagaagcggaagacgcatggagctctcaatgggccctatacaggctaaccgcactgggacaggtctgctgctgaccctccaacctgaacagaagtttcagaaagtcaagggatttggaggagccatgactgatgcagcagcactcaacatcttggccctgtctccaccagcccagaacctgctgttgaagtcctacttctcagaggaggggattgagtacaacatcatccgggttcccatggctagctgtgacttctccattaggacctatacatacgctgacacccccgatgattttcagctccataatttcagtctccctgaagaagacaccaaatggaagatacctctgattcacagagccttgcaactgtcccaaaggccagtgagcctcttcgcttctccctggactagtcctacatggctgaagactaatggtgcttacaatgggaagggctccctgaaaggacagccaggtgacatatatcatcagacatgggcccgctactttgtgaaattccttgatgcctatgcagagcacgggctccaattctgggcagtcaccgcagaaaacgagccctcagctgggctgctgtctggctacccctttcagtgcttgggctttactcctgagcatcaacgggacttcattgcccgggatttggggccaacactggccaacagcacccaccacaatgtaagactcctcattctggatgaccagaggctgctgctccctcattgggccaaggtggtgttgacaaacccagaagctgccaaatatgttcatggcatcgctgtccactggtacctggattttttggcccctccaaagtggactctgggagagacccacagactcttccccaataccacactgtttgcatcagaagcctgcgtggggagcaaattctgggagcagtctgttaggctgggttcctgggatcggggcatgcaatattcccatagtataataactaacctcctctaccacgtggtaggatggacagactggaatctggctttgaacccagaaggaggccccaattgggtgcgcaactttgttgacagccccatcattgtggatatcacaaaggacaccttctacaaacagcctatgttctatcatctggggcactttagcaagttcattccagagggttccactagagtaggcttggttgcctcacagaagaatgatctggatgctgtggcactcctgcatcctgacgggagtgcagtggtggtagtactgaacaggtctagcaaagatgttcccttgactatcaaagacccagctgtgggctttctggaaaccatttcccctggatactctatccacacctatctctggagaagacag

SEQ ID NO: 1024 - protein, 536 aa, synthetic construct
  REGION 1..536: note = Variant of B-Glucocerebrosidase
MEFSSPSREECPKPLSRVSIMAGSLTGLLLLQAVSWASGARPCIPKSFGYSSVVCVCNATYCDSVDPLTLPALGTFSRVESTRSGRRMELSMGPIQANRTGTGLLLTLQPEQKFQKVKGFGGAMTDAAALNILALSPPAQNLLLKSYFSEEGIEYNIIRVPMASCDFSIRTYTYADTPDDFQLHNFSLPEEDTKWKIPLIHRALQLSQRPVSLFASPWTSPTWLKTNGAYNGKGSLKGQPGDIYHQTWARYFVKFLDAYAEHGLQFWAVTAENEPSAGLLSGYPFQCLGFTPEHQRDFIARDLGPTLANSTHHNVRLLILDDQRLLLPHWAKVVLTNPEAAKYVHGIAVHWYLDFLAPPKWTLGETHRLFPNTTLFASEACVGSKFWEQSVRLGSWDRGMQYSHSIITNLLYHVVGWTDWNLALNPEGGPNWVRNFVDSPIIVDITKDTFYKQPMFYHLGHFSKFIPEGSTRVGLVASQKNDLDAVALLHPDGSAVVVVLNRSSKDVPLTIKDPAVGFLETISPGYSIHTYLWRRQ

SEQ ID NO: 1025 - DNA, 1608 bp, synthetic construct
  misc_feature 1..1608: note = Variant of B-Glucocerebrosidase
  source 1..1608: mol_type = other DNA
atggagttttcttctcctagtagagaagaatgccccaagccactgagcagggtgagcatcatggctggatccctcacagggctgcttcttttgcaggcagtctcatgggcctctggagccaggccctgtattcccaagtcattcggctactcctcagtggtgtgtgtatgcaatgccacctattgtgacagtgtcgatcctctcactctccctgctctgggtaccttctcccgggtggagagcacaagaagcggaagacgcatggagctctcaatgggccctatacagcggaaccgcactgggacaggtctgctgctgaccctccaacctgaacagaagtttcagaaagtcaagggatttggaggagccatgactgatgcagcagcactcaacatcttggccctgtctccaccagcccagaacctgctgttgaagtcctacttctcagaggaggggattgagtacaacatcatccgggttcccatggctagctgtgacttctccattaggacctatacatacgctgacacccccgatgattttatgctccataatttcagtctccctgaagaagacaccaaatggaagatacctctgattcacagagccttgcaactgtcccaaaggccagtgagcctcttcgcttctccctggactagtcctacatggctgaagactaatggtgcttacaatgggaagggctccctgaaaggacagccaggtgacatatatcatcagacatgggcccgctactttgtgaaattccttgatgcctatgcagagcacgggctccaattctgggcagtcaccgcagaaaacgagccctcagctgggctgctgtctggctacccctttcagtgcttgggctttactcctgagcatcaacgggacttcattgcccgggatttggggccaacactggccaacagcacccaccacaatgtaagactcctcattctggatgaccagaggctgctgctccctcattgggccaaggtggtgttgacaaacccagaagctgccaaatatgttcatggcatcgctgtccactggtacctggattttttggcccctgcaaagtggactctgggagagacccacagactcttccccaataccacactgtttgcatcagaagcctgcgtggggagcaaattctgggagcagtctgttaggctgggttcctgggatcggggcatgcaatattcccatagtataataactaacctcctctaccacgtggtaggatggacagactggaatctggctttgaacccagaaggaggccccaattgggtgcgcaactttgttgacagccccatcattgtggatatcacaaaggacaccttctacaaacagcctatgttctatcatctggggcactttagcaagttcattccagagggttccactagagtaggcttggttgcctcacagaagaatgatctggatgctgtggcactcctgcatcctgacgggagtgcagtggtggtagtactgaacaggtctagcaaagatgttcccttgactatcaaagacccagctgtgggctttctggaaaccatttcccctggatactctatccacacctatctctggagaagacag

SEQ ID NO: 1026 - protein, 536 aa, synthetic construct
  REGION 1..536: note = Variant of B-Glucocerebrosidase
MEFSSPSREECPKPLSRVSIMAGSLTGLLLLQAVSWASGARPCIPKSFGYSSVVCVCNATYCDSVDPLTLPALGTFSRVESTRSGRRMELSMGPIQRNRTGTGLLLTLQPEQKFQKVKGFGGAMTDAAALNILALSPPAQNLLLKSYFSEEGIEYNIIRVPMASCDFSIRTYTYADTPDDFMLHNFSLPEEDTKWKIPLIHRALQLSQRPVSLFASPWTSPTWLKTNGAYNGKGSLKGQPGDIYHQTWARYFVKFLDAYAEHGLQFWAVTAENEPSAGLLSGYPFQCLGFTPEHQRDFIARDLGPTLANSTHHNVRLLILDDQRLLLPHWAKVVLTNPEAAKYVHGIAVHWYLDFLAPAKWTLGETHRLFPNTTLFASEACVGSKFWEQSVRLGSWDRGMQYSHSIITNLLYHVVGWTDWNLALNPEGGPNWVRNFVDSPIIVDITKDTFYKQPMFYHLGHFSKFIPEGSTRVGLVASQKNDLDAVALLHPDGSAVVVVLNRSSKDVPLTIKDPAVGFLETISPGYSIHTYLWRRQ

SEQ ID NO: 1027 - DNA, 1608 bp, synthetic construct
  misc_feature 1..1608: note = Variant of B-Glucocerebrosidase
  source 1..1608: mol_type = other DNA
atggagttttcttctcctagtagagaagaatgccccaagccactgagcagggtgagcatcatggctggatccctcacagggctgcttcttttgcaggcagtctcatgggcctctggagccaggccctgtattcccaagtcattcggctactcctcagtggtgtgtgtatgcaatgccacctattgtgacagtgtcgatcctctcactctccctgctctgggtaccttctcccggtacgagagcacaagaagcggaagacgcatggagctctcaatgggccctatacagcggaaccgcactgggacaggtctgctgctgaccctccaacctgaacagaagtttcagaaagtcaagggatttggaggagccatgactgatgcagcagcactcaacatcttggccctgtctccaccagcccagaacctgctgttgaagtcctacttctcagaggaggggattgagtacaacatcatccgggttcccatggctagctgtgacttctccattaggacctatacatacgctgacacccccgatgattttcagctccataatttcagtctccctgaagaagacaccaaatggaagatacctctgattcacagagccttgcaactgtcccaaaggccagtgagcctcttcgcttctccctggactagtcctacatggctgaagactaatggtgcttacaatgggaagggctccctgaaaggacagccaggtgacatatatcatcagacatgggcccgctactttgtgaaattccttgatgcctatgcagagcacgggctccaattctgggcagtcaccgcagaaaacgagccctcagctgggctgctgtctggctacccctttcagtgcttgggctttactcctgagcatcaacgggacttcattgcccgggatttggggccaacactggccaacagcacccaccacaatgtaagactcctcattctggatgaccagaggctgctgctccctcattgggccaaggtggtgttgacaaacccagaagctgccaaatatgttcatggcatcgctgtccactggtacctggattttttggcccctccaaagtggactctgggagagacccacagactcttccccaataccacactgtttgcatcagaagcctgcgtggggagcaaattctgggagcagtctgttaggctgggttcctgggatcggggcatgcaatattcccatagtataataactaacctcctctaccacgtggtaggatggacagactggaatctggctttgaacccagaaggaggccccaattgggtgcgcaactttgttgacagccccatcattgtggatatcacaaaggacaccttctacaaacagcctatgttctatcatctggggcactttagcaagttcattccagagggttccactagagtaggcttggttgcctcacagaagaatgatctggatgctgtggcactcctgcatcctgacgggagtgcagtggtggtagtactgaacaggtctagcaaagatgttcccttgactatcaaagacccagctgtgggctttctggaaaccatttcccctggatactctatccacacctatctctggagaagacag

SEQ ID NO: 1028 - protein, 536 aa, synthetic construct
  REGION 1..536: note = Variant of B-Glucocerebrosidase
MEFSSPSREECPKPLSRVSIMAGSLTGLLLLQAVSWASGARPCIPKSFGYSSVVCVCNATYCDSVDPLTLPALGTFSRYESTRSGRRMELSMGPIQRNRTGTGLLLTLQPEQKFQKVKGFGGAMTDAAALNILALSPPAQNLLLKSYFSEEGIEYNIIRVPMASCDFSIRTYTYADTPDDFQLHNFSLPEEDTKWKIPLIHRALQLSQRPVSLFASPWTSPTWLKTNGAYNGKGSLKGQPGDIYHQTWARYFVKFLDAYAEHGLQFWAVTAENEPSAGLLSGYPFQCLGFTPEHQRDFIARDLGPTLANSTHHNVRLLILDDQRLLLPHWAKVVLTNPEAAKYVHGIAVHWYLDFLAPPKWTLGETHRLFPNTTLFASEACVGSKFWEQSVRLGSWDRGMQYSHSIITNLLYHVVGWTDWNLALNPEGGPNWVRNFVDSPIIVDITKDTFYKQPMFYHLGHFSKFIPEGSTRVGLVASQKNDLDAVALLHPDGSAVVVVLNRSSKDVPLTIKDPAVGFLETISPGYSIHTYLWRRQ

SEQ ID NO: 1029 - DNA, 1608 bp, synthetic construct
  misc_feature 1..1608: note = Variant of B-Glucocerebrosidase
  source 1..1608: mol_type = other DNA
atggagttttcttctcctagtagagaagaatgccccaagccactgagcagggtgagcatcatggctggatccctcacagggctgcttcttttgcaggcagtctcatgggcctctggagccaggccctgtattcccaagtcattcggctactcctcagtggtgtgtgtatgcaatgccacctattgtgacagtgtcgatcctctcactctccctgctctgggtaccttctcccggtacgagagcacaagaagcggaagacgcatggagctctcaatgggccctatacagcggaaccgcactgggacaggtctgctgctgaccctccaacctgaacagaagtttcagaaagtcaagggatttggaggagccatgactgatgcagcagcactcaacatcttggccctgtctccaccagcccagaacctgctgttgaagtcctacttctcagaggaggggattgagtacaacatcatccgggttcccatggctagctgtgacttctccattaggacctatacatacgctgacacccccgatgattttcaactccataatttcagtctccctgaagaagacaccaaatggaagatacctctgattcacagagccttgcaactgtcccaaaggccagtgagcctcttcgcttctccctggactagtcctacatggctgaagactaatggtgcttacaatgggaagggctccctgaaaggacagccaggtgacatatatcatcagacatgggcccgctactttgtgaaattccttgatgcctatgcagagcacgggctccaattctgggcagtcaccgcagaaaacgagccctcagctgggctgctgtctggctacccctttcagtgcttgggctttactcctgagcatcaacgggacttcattgcccgggatttggggccaacactggccaacagcacccaccacaatgtaagactcctcattctggatgaccagaggctgctgctccctcattgggccaaggtggtgttgacaaacccagaagctgccaaatatgttcatggcatcgctgtccactggtacctggattttttggcccctgcaaagtggactctgggagagacccacagactcttccccaataccacactgtttgcatcagaagcctgcgtggggagcaaattctgggagcagtctgttaggctgggttcctgggatcggggcatgcaatattcccatagtataataactaacctcctctaccacgtggtaggatggacagactggaatctggctttgaacccagaaggaggccccaattgggtgcgcaactttgttgacagccccatcattgtggatatcacaaaggacaccttctacaaacagcctatgttctatcatctggggcactttagcaagttcattccagagggttccactagagtaggcttggttgcctcacagaagaatgatctggatgctgtggcactcctgcatcctgacgggagtgcagtggtggtagtactgaacaggtctagcaaagatgttcccttgactatcaaagacccagctgtgggctttctggaaaccatttcccctggatactctatccacacctatctctggagaagacag

SEQ ID NO: 1030 - protein, 536 aa, synthetic construct
  REGION 1..536: note = Variant of B-Glucocerebrosidase
MEFSSPSREECPKPLSRVSIMAGSLTGLLLLQAVSWASGARPCIPKSFGYSSVVCVCNATYCDSVDPLTLPALGTFSRYESTRSGRRMELSMGPIQRNRTGTGLLLTLQPEQKFQKVKGFGGAMTDAAALNILALSPPAQNLLLKSYFSEEGIEYNIIRVPMASCDFSIRTYTYADTPDDFQLHNFSLPEEDTKWKIPLIHRALQLSQRPVSLFASPWTSPTWLKTNGAYNGKGSLKGQPGDIYHQTWARYFVKFLDAYAEHGLQFWAVTAENEPSAGLLSGYPFQCLGFTPEHQRDFIARDLGPTLANSTHHNVRLLILDDQRLLLPHWAKVVLTNPEAAKYVHGIAVHWYLDFLAPAKWTLGETHRLFPNTTLFASEACVGSKFWEQSVRLGSWDRGMQYSHSIITNLLYHVVGWTDWNLALNPEGGPNWVRNFVDSPIIVDITKDTFYKQPMFYHLGHFSKFIPEGSTRVGLVASQKNDLDAVALLHPDGSAVVVVLNRSSKDVPLTIKDPAVGFLETISPGYSIHTYLWRRQ

SEQ ID NO: 1031 - DNA, 1608 bp, synthetic construct
  misc_feature 1..1608: note = Variant of B-Glucocerebrosidase
  source 1..1608: mol_type = other DNA
atggagttttcttctcctagtagagaagaatgccccaagccactgagcagggtgagcatcatggctggatccctcacagggctgcttcttttgcaggcagtctcatgggcctctggagccaggccctgtattcccaagtcattcggctactcctcagtggtgtgtgtatgcaatgccacctattgtgacagtgtcgatcctctcactctccctgctctgggtaccttctcccgggtggagagcacaagaagcggaagacgcatggagctctcaatgggccctatacaggctaaccgcactgggacaggtctgctgctgaccctccaacctgaacagaagtttcagaaagtcaagggatttggaggagccatgactgatgcagcagcactcaacatcttggccctgtctccaccagcccagaacctgctgttgaagtcctacttctcagaggaggggattgagtacaacatcatccgggttcccatggctagctgtgacttctccattaggacctatacatacgctgacacccccgatgattttatgctccataatttcagtctccctgaagaagacaccaaatggaagatacctctgattcacagagccttgcaactgtcccaaaggccagtgagcctcttcgcttctccctggactagtcctacatggctgaagactaatggtgcttacaatgggaagggctccctgaaaggacagccaggtgacatatatcatcagacatgggcccgctactttgtgaaattccttgatgcctatgcagagcacgggctccaattctgggcagtcaccgcagaaaacgagccctcagctgggctgctgtctggctacccctttcagtgcttgggctttactcctgagcatcaacgggacttcattgcccgggatttggggccaacactggccaacagcacccaccacaatgtaagactcctcattctggatgaccagaggctgctgctccctcattgggccaaggtggtgttgacaaacccagaagctgccaaatatgttcatggcatcgctgtccactggtacctggattttttggcccctgcaaagtggactctgggagagacccacagactcttccccaataccacactgtttgcatcagaagcctgcgtggggagcaaattctgggagcagtctgttaggctgggttcctgggatcggggcatgcaatattcccatagtataataactaacctcctctaccacgtggtaggatggacagactggaatctggctttgaacccagaaggaggccccaattgggtgcgcaactttgttgacagccccatcattgtggatatcacaaaggacaccttctacaaacagcctatgttctatcatctggggcactttagcaagttcattccagagggttccactagagtaggcttggttgcctcacagaagaatgatctggatgctgtggcactcctgcatcctgacgggagtgcagtggtggtagtactgaacaggtctagcaaagatgttcccttgactatcaaagacccagctgtgggctttctggaaaccatttcccctggatactctatccacacctatctctggagaagacag

SEQ ID NO: 1032 - protein, 536 aa, synthetic construct
  REGION 1..536: note = Variant of B-Glucocerebrosidase
MEFSSPSREECPKPLSRVSIMAGSLTGLLLLQAVSWASGARPCIPKSFGYSSVVCVCNATYCDSVDPLTLPALGTFSRVESTRSGRRMELSMGPIQANRTGTGLLLTLQPEQKFQKVKGFGGAMTDAAALNILALSPPAQNLLLKSYFSEEGIEYNIIRVPMASCDFSIRTYTYADTPDDFMLHNFSLPEEDTKWKIPLIHRALQLSQRPVSLFASPWTSPTWLKTNGAYNGKGSLKGQPGDIYHQTWARYFVKFLDAYAEHGLQFWAVTAENEPSAGLLSGYPFQCLGFTPEHQRDFIARDLGPTLANSTHHNVRLLILDDQRLLLPHWAKVVLTNPEAAKYVHGIAVHWYLDFLAPAKWTLGETHRLFPNTTLFASEACVGSKFWEQSVRLGSWDRGMQYSHSIITNLLYHVVGWTDWNLALNPEGGPNWVRNFVDSPIIVDITKDTFYKQPMFYHLGHFSKFIPEGSTRVGLVASQKNDLDAVALLHPDGSAVVVVLNRSSKDVPLTIKDPAVGFLETISPGYSIHTYLWRRQ

SEQ ID NO: 1033 - DNA, 1608 bp, synthetic construct
  misc_feature 1..1608: note = Variant of B-Glucocerebrosidase
  source 1..1608: mol_type = other DNA
atggagttttcttctcctagtagagaagaatgccccaagccactgagcagggtgagcatcatggctggatccctcacagggctgcttcttttgcaggcagtctcatgggcctctggagccaggccctgtattcccaagtcattcggctactcctcagtggtgtgtgtatgcaatgccacctattgtgacagtgtcgatcctctcactctccctgctctgggtaccttctcccggtatgagagcacaagaagtggaagacgcatggagctctcaatgggccctatacaggctaaccgcactgggacaggtctgctgctgaccctccaacctgaacagaagtttcagaaagtcaagggatttggaggagccatgactgatgcagcagcactcaacatcttggccctgtctccaccagcccagaacctgctgttgaagtcctacttctcagaggaggggattgagtacaacatcatccgggttcccatggctagctgtgacttctccattaggacctatacatacgctgacacccccgatgattttcagctccataatttcagtctccctgaagaagacaccaaatggaagatacctctgattacgagagccttgcaactgtcccaaaggccagtgagcctcttcgcttctccctggactagtcctacatggctgaagactaatggtgcttacaatgggaagggctccctgaaaggacagccaggtgacatatatcatcagacatgggcccgctactttgtgaaattccttgatgcctatgcagagcacgggctccaattctgggcagtcaccgcagaaaacgagccctcagctgggctgctgtctggctacccctttcagtgcttgggctttactcctgagcatcaacgggacttcattgcccgggatttggggccaacactggccaacagcacccaccacaatgtaagactcctcattctggatgaccagaggctgctgctccctcattgggccaaggtggtgttgacaaacccagaagctgccaaatatgttcatggcatcgctgtccactggtacctggattttttggcccctgccaagtggactctgggagagacccacagactcttccccaataccacactgtttgcatcagaagcctgcgtggggagcaaattctgggagcagtctgttaggctgggttcctgggatcggggcatgcaatattcccatagtataataactaacctcctctaccacgtggtaggatggacagactggaatctggctttgaacccagaaggaggccccaattgggtgcgcaactttgttgacagccccatcattgtggatatcacaaaggacaccttctacaaacagcctatgttctatcatctggggcactttagcaagttcattccagagggttccactagagtaggcttggttgcctcacagaagaatgatctggatgctgtggcactcctgcatcctgacgggagtgcagtggtggtagtactgaacaggtctagcaaagatgttcccttgactatcaaagacccagctgtgggctttctggaaaccatttcccctggatactctatccacacctatctctggagaagacag

SEQ ID NO: 1034 - protein, 536 aa, synthetic construct
  REGION 1..536: note = Variant of B-Glucocerebrosidase
MEFSSPSREECPKPLSRVSIMAGSLTGLLLLQAVSWASGARPCIPKSFGYSSVVCVCNATYCDSVDPLTLPALGTFSRYESTRSGRRMELSMGPIQANRTGTGLLLTLQPEQKFQKVKGFGGAMTDAAALNILALSPPAQNLLLKSYFSEEGIEYNIIRVPMASCDFSIRTYTYADTPDDFQLHNFSLPEEDTKWKIPLITRALQLSQRPVSLFASPWTSPTWLKTNGAYNGKGSLKGQPGDIYHQTWARYFVKFLDAYAEHGLQFWAVTAENEPSAGLLSGYPFQCLGFTPEHQRDFIARDLGPTLANSTHHNVRLLILDDQRLLLPHWAKVVLTNPEAAKYVHGIAVHWYLDFLAPAKWTLGETHRLFPNTTLFASEACVGSKFWEQSVRLGSWDRGMQYSHSIITNLLYHVVGWTDWNLALNPEGGPNWVRNFVDSPIIVDITKDTFYKQPMFYHLGHFSKFIPEGSTRVGLVASQKNDLDAVALLHPDGSAVVVVLNRSSKDVPLTIKDPAVGFLETISPGYSIHTYLWRRQ

SEQ ID NO: 1035 - DNA, 1608 bp, synthetic construct
  misc_feature 1..1608: note = Variant of B-Glucocerebrosidase
  source 1..1608: mol_type = other DNA
atggagttttcttctcctagtagagaagaatgccccaagccactgagcagggtgagcatcatggctggatccctcacagggctgcttcttttgcaggcagtctcatgggcctctggagccaggccctgtattcccaagtcattcggctactcctcagtggtgtgtgtatgcaatgccacctattgtgacagtgtcgatcctctcactctccctgctctgggtaccttctcccggtatgagagcacaagaagtggaagacgcatggagctctcaatgggccctatacaggctaaccgcactgggacaggtctgctgctgaccctccaacctgaacagaagtttcagaaagtcaagggatttggaggagccatgactgatgcagcagcactcaacatcttggccctgtctccaccagcccagaacctgctgttgaagtcctacttctcagaggaggggattgagtacaacatcatccgggttcccatggctagctgtgacttctccattaggacctatacatacgctgacacccccgatgattttcagctccataatttcagtctccctgaagaagacaccaaatggaagatacctctgattcacagagccttgcaactgtcccaaaggccagtgagcctcttcgcttctccctggactagtcctacatggctgaagactaatggtgcttacaatgggaagggctccctgaaaggacagccaggtgacatatatcatcagacatgggcccgctactttgtgaaattccttgatgcctatgcagagcacgggctccaattctgggcagtcaccgcagaaaacgagccctcagctgggctgctgtctggctacccctttcagtgcttgggctttactcctgagcatcaacgggacttcattgcccgggatttggggccaacactggccaacagcacccaccacaatgtaagactcctcattctggatgaccagaggctgctgctccctcattgggccaaggtggtgttgacaaacccagaagctgccaaatatgttcatggcatcgctgtccactggtacctggattttttggcccctgccaagtggactctgggagagacccacagactcttccccaataccacactgtttgcatcagaagcctgcgtggggagcaaattctgggagcagtctgttaggctgggttcctgggatcggggcatgcaatattcccagagtataataactaacctcctctaccacgtggtaggatggacagactggaatctggctttgaacccagaaggaggccccaattgggtgcgcaactttgttgacagccccatcattgtggatatcacaaaggacaccttctacaaacagcctatgttctatcatctggggcactttagcaagttcattccagagggttccactagagtaggcttggttgcctcacagaagaatgatctggatgctgtggcactcctgcatcctgacgggagtgcagtggtggtagtactgaacaggtctagcaaagatgttcccttgactatcaaagacccagctgtgggctttctggaaaccatttcccctggatactctatccacacctatctctggagaagacag

SEQ ID NO: 1036 - protein, 536 aa, synthetic construct
  REGION 1..536: note = Variant of B-Glucocerebrosidase
MEFSSPSREECPKPLSRVSIMAGSLTGLLLLQAVSWASGARPCIPKSFGYSSVVCVCNATYCDSVDPLTLPALGTFSRYESTRSGRRMELSMGPIQANRTGTGLLLTLQPEQKFQKVKGFGGAMTDAAALNILALSPPAQNLLLKSYFSEEGIEYNIIRVPMASCDFSIRTYTYADTPDDFQLHNFSLPEEDTKWKIPLIHRALQLSQRPVSLFASPWTSPTWLKTNGAYNGKGSLKGQPGDIYHQTWARYFVKFLDAYAEHGLQFWAVTAENEPSAGLLSGYPFQCLGFTPEHQRDFIARDLGPTLANSTHHNVRLLILDDQRLLLPHWAKVVLTNPEAAKYVHGIAVHWYLDFLAPAKWTLGETHRLFPNTTLFASEACVGSKFWEQSVRLGSWDRGMQYSQSIITNLLYHVVGWTDWNLALNPEGGPNWVRNFVDSPIIVDITKDTFYKQPMFYHLGHFSKFIPEGSTRVGLVASQKNDLDAVALLHPDGSAVVVVLNRSSKDVPLTIKDPAVGFLETISPGYSIHTYLWRRQ

SEQ ID NO: 1037 - DNA, 1608 bp, synthetic construct
  misc_feature 1..1608: note = Variant of B-Glucocerebrosidase
  source 1..1608: mol_type = other DNA
atggagttttcttctcctagtagagaagaatgccccaagccactgagcagggtgagcatcatggctggatccctcacagggctgcttcttttgcaggcagtctcatgggcctctggagccaggccctgtattcccaagtcattcggctactcctcagtggtgtgtgtatgcaatgccacctattgtgacagtgtcgatcctctcactctccctgctctgggtaccttctcccggtatgagagcacaagaagtggaagacgcatggagctctcaatgggccctatacaggctaaccgcactgggacaggtctgctgctgaccctccaacctgaacagaagtttcagaaagtcaagggatttggaggagccatgactgatgcagcagcactcaacatcttggccctgtctccaccagcccagaacctgctgttgaagtcctacttctcagaggaggggattgagtacaacatcatccgggttcccatggctagctgtgacttctccattaggacctatacatacgctgacacccccgatgattttcagctccataatttcagtctccctgaagaagacaccaaatggaagatacctctgattcacagagccttgcaactgtcccaaaggccagtgagcctcttcgcttctccctggactagtcctacatggctgaagactaatggtgcttacaatgggaagggctccctgaaaggacagccaggtgacatatatcatcagacatgggcccgctactttgtgaaattccttgatgcctatgcagagcacgggctccaattctgggcagtcaccgcagaaaacgagccctcagctgggctgctgtctggctacccctttcagtgcttgggctttactcctgagcatcaacgggacttcattgcccgggatttggggccaacactggccaacagcacccaccacaatgtaagactcctcattctggatgaccagaggctgctgctccctcattgggccaaggtggtgttgacaaacccagaagctgccaaatatgttcatggcatcgctgtccactggtacctggattttttggcccctgccaagtggactctgggagagacccacagactcttccccaataccacactgtttgcatcagaagcctgcgtggggagcaaattctgggagcagtctgttaggctgggttcctgggatcggggcatgcaatattcccatagtataataactaacctcctctaccacgtggtaggatggacagactggaatctggctttgaacccagaaggaggccccaattgggtgcgcaactttgttgacagccccatcattgtggatatcacaaaggacaccttctacaaacagcctatgttctatcatctggggcactttagcaagttcattccagagggttccactagagtaggcttggttgcctcacagaagaatgatctggaggctgtggcactcctgcatcctgacgggagtgcagtggtggtagtactgaacaggtctagcaaagatgttcccttgactatcaaagacccagctgtgggctttctggaaaccatttcccctggatactctatccacacctatctctggagaagacag

SEQ ID NO: 1038 - protein, 536 aa, synthetic construct
  REGION 1..536: note = Variant of B-Glucocerebrosidase
MEFSSPSREECPKPLSRVSIMAGSLTGLLLLQAVSWASGARPCIPKSFGYSSVVCVCNATYCDSVDPLTLPALGTFSRYESTRSGRRMELSMGPIQANRTGTGLLLTLQPEQKFQKVKGFGGAMTDAAALNILALSPPAQNLLLKSYFSEEGIEYNIIRVPMASCDFSIRTYTYADTPDDFQLHNFSLPEEDTKWKIPLIHRALQLSQRPVSLFASPWTSPTWLKTNGAYNGKGSLKGQPGDIYHQTWARYFVKFLDAYAEHGLQFWAVTAENEPSAGLLSGYPFQCLGFTPEHQRDFIARDLGPTLANSTHHNVRLLILDDQRLLLPHWAKVVLTNPEAAKYVHGIAVHWYLDFLAPAKWTLGETHRLFPNTTLFASEACVGSKFWEQSVRLGSWDRGMQYSHSIITNLLYHVVGWTDWNLALNPEGGPNWVRNFVDSPIIVDITKDTFYKQPMFYHLGHFSKFIPEGSTRVGLVASQKNDLEAVALLHPDGSAVVVVLNRSSKDVPLTIKDPAVGFLETISPGYSIHTYLWRRQ

SEQ ID NO: 1039 - DNA, 1608 bp, synthetic construct
  misc_feature 1..1608: note = Variant of B-Glucocerebrosidase
  source 1..1608: mol_type = other DNA
atggagttttcttctcctagtagagaagaatgccccaagccactgagcagggtgagcatcatggctggatccctcacagggctgcttcttttgcaggcagtctcatgggcctctggagccaggccctgtattcccaagtcattcggctactcctcagtggtgtgtgtatgcaatgccacctattgtgacagtgtcgatcctctcactctccctgctctgggtaccttctcccggtatgagagcacaagaagtggaagacgcatggagctctcaatgggccctatacaggctaaccgcactgggacaggtctgctgctgaccctccaacctgaacagaagtttcagaaagtcaagggatttggaggagccatgactgatgcagcagcactcaacatcttggccctgtctccaccagcccagaacctgctgttgaagtcctacttctcagaggaggggattgagtacaacatcatccgggttcccatggctagctgtgacttctccattaggacctatacatacgctgacacccccgatgattttcagctccataatttcagtctccctgaagaagacaccaaatggaagatacctctgattcggagagccttgcaactgtcccaaaggccagtgagcctcttcgcttctccctggactagtcctacatggctgaagactaatggtgcttacaatgggaagggctccctgaaaggacagccaggtgacatatatcatcagacatgggcccgctactttgtgaaattccttgatgcctatgcagagcacgggctccaattctgggcagtcaccgcagaaaacgagccctcagctgggctgctgtctggctacccctttcagtgcttgggctttactcctgagcatcaacgggacttcattgcccgggatttggggccaacactggccaacagcacccaccacaatgtaagactcctcattctggatgaccagaggctgctgctccctcattgggccaaggtggtgttgacaaacccagaagctgccaaatatgttcatggcatcgctgtccactggtacctggattttttggcccctgccaagtggactctgggagagacccacagactcttccccaataccacactgtttgcatcagaagcctgcgtggggagcaaattctgggagcagtctgttaggctgggttcctgggatcggggcatgcaatattcccatagtataataactaacctcctctaccacgtggtaggatggacagactggaatctggctttgaacccagaaggaggccccaattgggtgcgcaactttgttgacagccccatcattgtggatatcacaaaggacaccttctacaaacagcctatgttctatcatctggggcactttagcaagttcattccagagggttccactagagtaggcttggttgcctcacagaagaatgatctggatgctgtggcactcctgcatcctgacgggagtgcagtggtggtagtactgaacaggtctagcaaagatgttcccttgactatcaaagacccagctgtgggctttctggaaaccatttcccctggatactctatccacacctatctctggagaagacag

SEQ ID NO: 1040 - protein, 536 aa, synthetic construct
  REGION 1..536: note = Variant of B-Glucocerebrosidase
MEFSSPSREECPKPLSRVSIMAGSLTGLLLLQAVSWASGARPCIPKSFGYSSVVCVCNATYCDSVDPLTLPALGTFSRYESTRSGRRMELSMGPIQANRTGTGLLLTLQPEQKFQKVKGFGGAMTDAAALNILALSPPAQNLLLKSYFSEEGIEYNIIRVPMASCDFSIRTYTYADTPDDFQLHNFSLPEEDTKWKIPLIRRALQLSQRPVSLFASPWTSPTWLKTNGAYNGKGSLKGQPGDIYHQTWARYFVKFLDAYAEHGLQFWAVTAENEPSAGLLSGYPFQCLGFTPEHQRDFIARDLGPTLANSTHHNVRLLILDDQRLLLPHWAKVVLTNPEAAKYVHGIAVHWYLDFLAPAKWTLGETHRLFPNTTLFASEACVGSKFWEQSVRLGSWDRGMQYSHSIITNLLYHVVGWTDWNLALNPEGGPNWVRNFVDSPIIVDITKDTFYKQPMFYHLGHFSKFIPEGSTRVGLVASQKNDLDAVALLHPDGSAVVVVLNRSSKDVPLTIKDPAVGFLETISPGYSIHTYLWRRQ

SEQ ID NO: 1041 - DNA, 1608 bp, synthetic construct
  misc_feature 1..1608: note = Variant of B-Glucocerebrosidase
  source 1..1608: mol_type = other DNA
atggagttttcttctcctagtagagaagaatgccccaagccactgagcagggtgagcatcatggctggatccctcacagggctgcttcttttgcaggcagtctcatgggcctctggagccaggccctgtattcccaagtcattcggctactcctcagtggtgtgtgtatgcaatgccacctattgtgacagtgtcgatcctctcactctccctgctctgggtaccttctcccggtatgagagcacaagaagtggaagacgcatggagctctcaatgggccctatacaggctaaccgcactgggacaggtctgctgctgaccctccaacctgaacagaagtttcagaaagtcaagggatttggaggagccatgactgatgcagcagcactcaacatcttggccctgtctccaccagcccagaacctgctgttgaagtcctacttctcagaggaggggattgagtacaacatcatccgggttcccatggctagctgtgacttctccattaggacctatacatacgctgacacccccgatgattttcagctccataatttcagtctccctgaagaagacaccaaatggaagatacctctgattcacagagccttgcaactgtcccaaaggccagtgagcctcttcgcttctccctggactagtcctacatggctgaagactaatggtgcttacaatgggaagggctccctgaaaggacagccaggtgacatatatcatcagacatgggcccgctactttgtgaaattccttgatgcctatgcagagcacgggctccaattctgggcagtcaccgcagaaaacgagccctcagctgggctgctgtctggctacccctttcagtgcttgggctttactcctgagcatcaacgggacttcattgcccgggatttggggccaacactggccaacagcacccaccacaatgtaagactcctcattctggatgaccagaggctgctgctccctcattgggccaaggtggtgttgacaaacccagaagctgccaaatatgttcatggcatcgctgtccactggtacctggattttttggcccctgccaagtggactctgggagagacccacagactcttccccaataccacactgtttgcatcagaagcctgcgtggggagcaaattctgggagcagtctgttaggctgggttcctgggatcggggcatgcaatattcccatagtataataactaacctcctctaccacgtggtaggatggacagactggaatctggctttgaacccagaaggaggccccaattgggtgcgcaactttgttgacagccccatcattgtggatatcaataaggacaccttctacaaacagcctatgttctatcatctggggcactttagcaagttcattccagagggttccactagagtaggcttggttgcctcacagaagaatgatctggatgctgtggcactcctgcatcctgacgggagtgcagtggtggtagtactgaacaggtctagcaaagatgttcccttgactatcaaagacccagctgtgggctttctggaaaccatttcccctggatactctatccacacctatctctggagaagacag

SEQ ID NO: 1042 - protein, 536 aa, synthetic construct
  REGION 1..536: note = Variant of B-Glucocerebrosidase
MEFSSPSREECPKPLSRVSIMAGSLTGLLLLQAVSWASGARPCIPKSFGYSSVVCVCNATYCDSVDPLTLPALGTFSRYESTRSGRRMELSMGPIQANRTGTGLLLTLQPEQKFQKVKGFGGAMTDAAALNILALSPPAQNLLLKSYFSEEGIEYNIIRVPMASCDFSIRTYTYADTPDDFQLHNFSLPEEDTKWKIPLIHRALQLSQRPVSLFASPWTSPTWLKTNGAYNGKGSLKGQPGDIYHQTWARYFVKFLDAYAEHGLQFWAVTAENEPSAGLLSGYPFQCLGFTPEHQRDFIARDLGPTLANSTHHNVRLLILDDQRLLLPHWAKVVLTNPEAAKYVHGIAVHWYLDFLAPAKWTLGETHRLFPNTTLFASEACVGSKFWEQSVRLGSWDRGMQYSHSIITNLLYHVVGWTDWNLALNPEGGPNWVRNFVDSPIIVDINKDTFYKQPMFYHLGHFSKFIPEGSTRVGLVASQKNDLDAVALLHPDGSAVVVVLNRSSKDVPLTIKDPAVGFLETISPGYSIHTYLWRRQ

SEQ ID NO: 1043 - DNA, 1608 bp, synthetic construct
  misc_feature 1..1608: note = Variant of B-Glucocerebrosidase
  source 1..1608: mol_type = other DNA
atggagttttcttctcctagtagagaagaatgccccaagccactgagcagggtgagcatcatggctggatccctcacagggctgcttcttttgcaggcagtctcatgggcctctggagccaggccctgtattcccaagtcattcggctactcctcagtggtgtgtgtatgcaatgccacctattgtgacagtgtcgatcctctcactctccctgctctgggtaccttctcccggtatgagagcacaagaagtggaagacgcatggagctctcaatgggccctatacaggctaaccgcactgggacaggtctgctgctgaccctccaacctgaacagaagtttcagaaagtcaagggatttggaggagccatgactgatgcagcagcactcaacatcttggccctgtctccaccagcccagaacctgctgttgaagtcctacttctcagaggaggggattgagtacaacatcatccgggttcccatggctagctgtgacttctccattaggacctatacatacgctgacacccccgatgattttcagctccataatttcagtctccctgaagaagacaccaaatggaagatacctctgattcacagagccttgcaactgtcccaaaggccagtgagcctcttcgcttctccctggactagtcctacatggctgaagactaatggtgcttacaatgggaagggctccctgaaaggacagccaggtgacatatatcatcagacatgggcccgctactttgtgaaattccttgatgcctatgcagagcacgggctccaattctgggcagtcaccgcagaaaacgagccctcagctgggctgctgtctggctacccctttcagtgcttgggctttactcctgagcatcaacgggacttcattgcccgggatttggggccaacactggccaacagcacccaccacaatgtaagactcctcattctggatgaccagaggctgctgctccctcattgggccaaggtggtgttgacaaacccagaagctgccaaatatgttcatggcatcgctgtccactggtacctggattttttggcccctgccaagtggactctgggagagacccacagactcttccccaataccacactgtttgcatcagaagcctgcgtggggagcaaattctgggagcagtctgttaggctgggttcctgggatcggggcatgcaatattcccatagtataataactaacctcctctaccacgtggtaggatggacagactggaatctggctttgaacccagaaggaggccccaattgggtgcgcaactttgttgacagccccatcattgtggatatcacaaaggacaccttctacaaacagcctatgttctatcatctggggcactttagcaagttcattccagagggttccactagagtaggcttggttgcctcacagaagaatgatctggatgctgtggcactcctgcatcctgacgggactggggtggtggtagtactgaacaggtctagcaaagatgttcccttgactatcaaagacccagctgtgggctttctggaaaccatttcccctggatactctatccacacctatctctggagaagacag

SEQ ID NO: 1044 - protein, 536 aa, synthetic construct
  REGION 1..536: note = Variant of B-Glucocerebrosidase
MEFSSPSREECPKPLSRVSIMAGSLTGLLLLQAVSWASGARPCIPKSFGYSSVVCVCNATYCDSVDPLTLPALGTFSRYESTRSGRRMELSMGPIQANRTGTGLLLTLQPEQKFQKVKGFGGAMTDAAALNILALSPPAQNLLLKSYFSEEGIEYNIIRVPMASCDFSIRTYTYADTPDDFQLHNFSLPEEDTKWKIPLIHRALQLSQRPVSLFASPWTSPTWLKTNGAYNGKGSLKGQPGDIYHQTWARYFVKFLDAYAEHGLQFWAVTAENEPSAGLLSGYPFQCLGFTPEHQRDFIARDLGPTLANSTHHNVRLLILDDQRLLLPHWAKVVLTNPEAAKYVHGIAVHWYLDFLAPAKWTLGETHRLFPNTTLFASEACVGSKFWEQSVRLGSWDRGMQYSHSIITNLLYHVVGWTDWNLALNPEGGPNWVRNFVDSPIIVDITKDTFYKQPMFYHLGHFSKFIPEGSTRVGLVASQKNDLDAVALLHPDGTGVVVVLNRSSKDVPLTIKDPAVGFLETISPGYSIHTYLWRRQ

SEQ ID NO: 1045 - DNA, 1608 bp, synthetic construct
  misc_feature 1..1608: note = Variant of B-Glucocerebrosidase
  source 1..1608: mol_type = other DNA
atggagttttcttctcctagtagagaagaatgccccaagccactgagcagggtgagcatcatggctggatccctcacagggctgcttcttttgcaggcagtctcatgggcctctggagccaggccctgtattcccaagtcattcggctactcctcagtggtgtgtgtatgcaatgccacctattgtgacagtgtcgatcctctcactctccctgctctgggtaccttctcccggtatgagagcacaagaagtggaagacgcatggagctctcaatgggccctatacaggctaaccgcactgggacaggtctgctgctgaccctccaacctgaacagaagtttcagaaagtcaagggatttggaggagccatgactgatgcagcagcactcaacatcttggccctgtctccaccagcccagaacctgctgttgaagtcctacttctcagaggaggggattgagtacaacatcatccgggttcccatggctagctgtgacttctccattaggacctatacatacgctgacacccccgatgattttcagctccataatttcagtctccctgaagaagacaccaaatggaagatacctctgattcacagagccttgcaactgtcccaaaggccagtgagcctcttcgcttctccctggactagtcctacatggctgaagactaatggtgcttacaatgggaagggctccctgaaaggacagccaggtgacatatatcatcagacatgggcccgctactttgtgaaattccttgatgcctatgcagagcacgggctccaattctgggcagtcaccgcagaaaacgagccctcagctgggctgctgtctggctacccctttcagtgcttgggctttactcctgagcatcaacgggacttcattgcccgggatttggggccaaccctggccaacagcacccaccacaatgtaagactcctcattctggatgaccagaggctgctgctccctcattgggccaaggtggtgttgacaaacccagaagctgccaaatatgttcatggcatcgctgtccactggtacctggattttttggcccctgccaagtggactctgggagagacccacagactcttccccaataccacactgtttgcatcagaagcctgcgtggggagcaaattctgggagcagtctgttaggctgggttcctgggatcggggcatgcaatattcccatagtataataactaacctcctctaccacgtggtaggatggacagactggaatctggctttgaacccagaaggaggccccaattgggtgcgcaactttgttgacagccccatcattgtggatatcacaaaggacaccttctacaaacagcctatgttctatcatctggggcactttagcaagttcattccagagggttccactagagtaggcttggttgcctcacagaagaatgatctggatgctgtggcactcctgcatcctgacgggagtggtgtggtggtagtactgaacaggtctagcaaagatgttcccttgactatcaaagacccagctgtgggctttctggaaaccatttcccctggatactctatccacacctatctctggagaagacag

SEQ ID NO: 1046 - protein, 536 aa, synthetic construct
  REGION 1..536: note = Variant of B-Glucocerebrosidase
MEFSSPSREECPKPLSRVSIMAGSLTGLLLLQAVSWASGARPCIPKSFGYSSVVCVCNATYCDSVDPLTLPALGTFSRYESTRSGRRMELSMGPIQANRTGTGLLLTLQPEQKFQKVKGFGGAMTDAAALNILALSPPAQNLLLKSYFSEEGIEYNIIRVPMASCDFSIRTYTYADTPDDFQLHNFSLPEEDTKWKIPLIHRALQLSQRPVSLFASPWTSPTWLKTNGAYNGKGSLKGQPGDIYHQTWARYFVKFLDAYAEHGLQFWAVTAENEPSAGLLSGYPFQCLGFTPEHQRDFIARDLGPTLANSTHHNVRLLILDDQRLLLPHWAKVVLTNPEAAKYVHGIAVHWYLDFLAPAKWTLGETHRLFPNTTLFASEACVGSKFWEQSVRLGSWDRGMQYSHSIITNLLYHVVGWTDWNLALNPEGGPNWVRNFVDSPIIVDITKDTFYKQPMFYHLGHFSKFIPEGSTRVGLVASQKNDLDAVALLHPDGSGVVVVLNRSSKDVPLTIKDPAVGFLETISPGYSIHTYLWRRQ

SEQ ID NO: 1047 - DNA, 1608 bp, synthetic construct
  misc_feature 1..1608: note = Variant of B-Glucocerebrosidase
  source 1..1608: mol_type = other DNA
atggagttttcttctcctagtagagaagaatgccccaagccactgagcagggtgagcatcatggctggatccctcacagggctgcttcttttgcaggcagtctcatgggcctctggagccaggccctgtattcccaagtcattcggctactcctcagtggtgtgtgtatgcaatgccacctattgtgacagtgtcgatcctctcactctccctgctctgggtaccttctcccggtatgagagcacaagaagtggaagacgcatggagctctcaatgggccctatacaggctaaccgcactgggacaggtctgctgctgaccctccaacctgaacagaagtttcagaaagtcaagggatttggaggagccatgactgatgcagcagcactcaacatcttggccctgtctccaccagcccagaacctgctgttgaagtcctacttctcagaggaggggattgagtacaacatcatccgggttcccatggctagctgtgacttctccattaggacctatacatacgctgacacccccgatgattttcagctccataatttcagtctccctgaagaagacaccaaatggaagatacctctgattcacagagccttgcaactgtcccaaaggccagtgagcctcttcgcttctccctggactagtcctacatggctgaagactaatggtgcttacaatgggaagggctccctgaaaggacagccaggtgacatatatcatcagacatgggcccgctactttgtgaaattccttgatgcctatgcagagcacgggctccaattctgggcagtcaccgcagaaaacgagccctcagctgggctgctgtctggctacccctttcagtgcttgggctttactcctgagcatcaacgggacttcattgcccgggatttggggccaacactggccaacagcacccaccacaatgtaagactcctcattctggatgaccagaggctgctgctccctcattgggccaaggtggtgttgacaaacccagaagctgccaaatatgttcatggcatcgctgtccactggtacctggattttttggcccctgccaagtggactctgggagagacccacagactcttccccaataccacactgtttgcatcagaagcctgcgtggggagcaaattctgggagcagtctgttaggctgggttcctgggatcggggcatgcaatattcccatagtataataactaacctcctctggcacgtggtaggatggacagactggaatctggctttgaacccagaaggaggccccaattgggtgcgcaactttgttgacagccccatcattgtggatatcacaaaggacaccttctacaaacagcctatgttctatcatctggggcactttagcaagttcattccagagggttccactagagtaggcttggttgcctcacagaagaatgatctggatgctgtggcactcctgcatcctgacgggagtgcagtggtggtagtactgaacaggtctagcaaagatgttcccttgactatcaaagacccagctgtgggctttctggaaaccatttcccctggatactctatccacacctatctctggagaagacag

SEQ ID NO: 1048 - protein, 536 aa, synthetic construct
  REGION 1..536: note = Variant of B-Glucocerebrosidase
MEFSSPSREECPKPLSRVSIMAGSLTGLLLLQAVSWASGARPCIPKSFGYSSVVCVCNATYCDSVDPLTLPALGTFSRYESTRSGRRMELSMGPIQANRTGTGLLLTLQPEQKFQKVKGFGGAMTDAAALNILALSPPAQNLLLKSYFSEEGIEYNIIRVPMASCDFSIRTYTYADTPDDFQLHNFSLPEEDTKWKIPLIHRALQLSQRPVSLFASPWTSPTWLKTNGAYNGKGSLKGQPGDIYHQTWARYFVKFLDAYAEHGLQFWAVTAENEPSAGLLSGYPFQCLGFTPEHQRDFIARDLGPTLANSTHHNVRLLILDDQRLLLPHWAKVVLTNPEAAKYVHGIAVHWYLDFLAPAKWTLGETHRLFPNTTLFASEACVGSKFWEQSVRLGSWDRGMQYSHSIITNLLWHVVGWTDWNLALNPEGGPNWVRNFVDSPIIVDITKDTFYKQPMFYHLGHFSKFIPEGSTRVGLVASQKNDLDAVALLHPDGSAVVVVLNRSSKDVPLTIKDPAVGFLETISPGYSIHTYLWRRQ

SEQ ID NO: 1049 - DNA, 1608 bp, synthetic construct
  misc_feature 1..1608: note = Variant of B-Glucocerebrosidase
  source 1..1608: mol_type = other DNA
atggagttttcttctcctagtagagaagaatgccccaagccactgagcagggtgagcatcatggctggatccctcacagggctgcttcttttgcaggcagtctcatgggcctctggagccaggccctgtattcccaagtcattcggctactcctcagtggtgtgtgtatgcaatgccacctattgtgacagtgtcgatcctctcactctccctgctctgggtaccttctcccggtatgagagcacaagaagtggaagacgcatggagctctcaatgggccctatacaggctaaccgcactgggacaggtctgctgctgaccctccaacctgaacagaagtttcagaaagtcaagggatttggaggagccatgactgatgcagcagcactcaacatcttggccctgtctccaccagcccagaacctgctgttgaagtcctacttctcagaggaggggattgagtacaacatcatccgggttcccatggctagctgtgacttctccattaggacctatacatacgctgacacccccgatgattttcagctccataatttcagtctccctgaagaagacaccaaatggaagatacctctgattcacagagccttgcaactgtcccaaaggccagtgagcctcttcgcttctccctggactagtcctacatggctgaagactaatggtgcttacaatgggaagggctccctgaaaggacagccaggtgacatatatcatcagacatgggcccgctactttgtgaaattccttgatgcctatgcagagcacgggctccaattctgggcagtcaccgcagaaaacgagccctcagctgggctgctgtctggctacccctttcagtgcttgggctttactcctgagcatcaacgggacttcattgcccgggatttggggccaacactggccaacagcacccaccacaatgtaagactcctcattctggatgaccagaggctgctgctccctcattgggccaaggtggtgttgacaaacccagaagctgccaaatatgttcatggcatcgctgtccactggtacctggattttttggcccctgccaagtggactctgggagagacccacagactcttccccaataccacactgtttgcatcagaagcctgcgtggggagcaatttctgggagcagtctgttaggctgggttcctgggatcggggcatgcaatattcccatagtataataactaacctcctctaccacgtggtaggatggacagactggaatctggctttgaacccagaaggaggccccaattgggtgcgcaactttgttgacagccccatcattgtggatatcacaaaggacaccttctacaaacagcctatgttctatcatctggggcactttagcaagttcattccagagggttccactagagtaggcttggttgcctcacagaagaatgatctggatgctgtggcactcctgcatcctgacgggagtgcagtggtggtagtactgaacaggtctagcaaagatgttcccttgactatcaaagacccagctgtgggctttctggaaaccatttcccctggatactctatccacacctatctctggagaagacag

SEQ ID NO: 1050 - protein, 536 aa, synthetic construct
  REGION 1..536: note = Variant of B-Glucocerebrosidase
MEFSSPSREECPKPLSRVSIMAGSLTGLLLLQAVSWASGARPCIPKSFGYSSVVCVCNATYCDSVDPLTLPALGTFSRYESTRSGRRMELSMGPIQANRTGTGLLLTLQPEQKFQKVKGFGGAMTDAAALNILALSPPAQNLLLKSYFSEEGIEYNIIRVPMASCDFSIRTYTYADTPDDFQLHNFSLPEEDTKWKIPLIHRALQLSQRPVSLFASPWTSPTWLKTNGAYNGKGSLKGQPGDIYHQTWARYFVKFLDAYAEHGLQFWAVTAENEPSAGLLSGYPFQCLGFTPEHQRDFIARDLGPTLANSTHHNVRLLILDDQRLLLPHWAKVVLTNPEAAKYVHGIAVHWYLDFLAPAKWTLGETHRLFPNTTLFASEACVGSNFWEQSVRLGSWDRGMQYSHSIITNLLYHVVGWTDWNLALNPEGGPNWVRNFVDSPIIVDITKDTFYKQPMFYHLGHFSKFIPEGSTRVGLVASQKNDLDAVALLHPDGSAVVVVLNRSSKDVPLTIKDPAVGFLETISPGYSIHTYLWRRQ

SEQ ID NO: 1051 - DNA, 1608 bp, synthetic construct
  misc_feature 1..1608: note = Variant of B-Glucocerebrosidase
  source 1..1608: mol_type = other DNA
atggagttttcttctcctagtagagaagaatgccccaagccactgagcagggtgagcatcatggctggatccctcacagggctgcttcttttgcaggcagtctcatgggcctctggagccaggccctgtattcccaagtcattcggctactcctcagtggtgtgtgtatgcaatgccacctattgtgacagtgtcgatcctctcactctccctgctctgggtaccttctcccggtatgagagcacaagaagtggaagacgcatggagctctcaatgggccctatacaggctaaccgcactgggacaggtctgctgctgaccctccaacctgaacagaagtttcagaaagtcaagggatttggaggagccatgactgatgcagcagcactcaacatcttggccctgtctccaccagcccagaacctgctgttgaagtcctacttctcagaggaggggattgagtacaacatcatccgggttcccatggctagctgtgacttctccattaggacctatacatacgctgacacccccgatgattttcagctccataatttcagtctccctgaagaagacaccaaatggaagatacctctgattcacagagccttgcaactgtcccaaaggccagtgagcctcttcgcttctccctggactagtcctacatggctgaagactaatggtgcttacaatgggaagggctccctgaaaggacagccaggtgacatatatcatcagacatgggcccgctactttgtgaaattccttgatgcctatgcagagcacgggctccaattctgggcagtcaccgcagaaaacgagccctcagctgggctgctgtctggctacccctttcagtgcttgggctttactcctgagcatcaacgggacttcattgcccgggatttggggccaacactggccaacagcacccaccacaatgtaagactcctcattctggatgaccagaggctgctgctccctcattgggccaaggtggtgttgacaaacccagaagctgccaaatatgttcatggcatcgctgtccactggtacctggattttttggcccctgccaagtggactctgggagagacccacagactcttccccaataccacactgtttgcatcagaagcctgcgtggggagcgggttctgggagcagtctgttaggctgggttcctgggatcggggcatgcaatattcccatagtataataactaacctcctctaccacgtggtaggatggacagactggaatctggctttgaacccagaaggaggccccaattgggtgcgcaactttgttgacagccccatcattgtggatatcacaaaggacaccttctacaaacagcctatgttctatcatctggggcactttagcaagttcattccagagggttccactagagtaggcttggttgcctcacagaagaatgatctggatgctgtggcactcctgcatcctgacgggagtgcagtggtggtagtactgaacaggtctagcaaagatgttcccttgactatcaaagacccagctgtgggctttctggaaaccatttcccctggatactctatccacacctatctctggagaagacag

SEQ ID NO: 1052 - protein, 536 aa, synthetic construct
  REGION 1..536: note = Variant of B-Glucocerebrosidase
MEFSSPSREECPKPLSRVSIMAGSLTGLLLLQAVSWASGARPCIPKSFGYSSVVCVCNATYCDSVDPLTLPALGTFSRYESTRSGRRMELSMGPIQANRTGTGLLLTLQPEQKFQKVKGFGGAMTDAAALNILALSPPAQNLLLKSYFSEEGIEYNIIRVPMASCDFSIRTYTYADTPDDFQLHNFSLPEEDTKWKIPLIHRALQLSQRPVSLFASPWTSPTWLKTNGAYNGKGSLKGQPGDIYHQTWARYFVKFLDAYAEHGLQFWAVTAENEPSAGLLSGYPFQCLGFTPEHQRDFIARDLGPTLANSTHHNVRLLILDDQRLLLPHWAKVVLTNPEAAKYVHGIAVHWYLDFLAPAKWTLGETHRLFPNTTLFASEACVGSGFWEQSVRLGSWDRGMQYSHSIITNLLYHVVGWTDWNLALNPEGGPNWVRNFVDSPIIVDITKDTFYKQPMFYHLGHFSKFIPEGSTRVGLVASQKNDLDAVALLHPDGSAVVVVLNRSSKDVPLTIKDPAVGFLETISPGYSIHTYLWRRQ

SEQ ID NO: 1053 - DNA, 1608 bp, synthetic construct
  misc_feature 1..1608: note = Variant of B-Glucocerebrosidase
  source 1..1608: mol_type = other DNA
atggagttttcttctcctagtagagaagaatgccccaagccactgagcagggtgagcatcatggctggatccctcacagggctgcttcttttgcaggcagtctcatgggcctctggagccaggccctgtattcccaagtcattcggctactcctcagtggtgtgtgtatgcaatgccacctattgtgacagtgtcgatcctctcactctccctgctctgggtaccttctcccggtatgagagcacaagaagtggaagacgcatggagctctcaatgggccctatacaggctaaccgcaatgggacaggtctgctgctgaccctccaacctgaacagaagtttcagaaagtcaagggatttggaggagccatgactgatgcagcagcactcaacatcttggccctgtctccaccagcccagaacctgctgttgaagtcctacttctcagaggaggggattgagtacaacatcatccgggttcccatggctagctgtgacttctccattaggacctatacatacgctgacacccccgatgattttcagctccataatttcagtctccctgaagaagacaccaaatggaagatacctctgattcacagagccttgcaactgtcccaaaggccagtgagcctcttcgcttctccctggactagtcctacatggctgaagactaatggtgcttacaatgggaagggctccctgaaaggacagccaggtgacatatatcatcagacatgggcccgctactttgtgaaattccttgatgcctatgcagagcacgggctccaattctgggcagtcaccgcagaaaacgagccctcagctgggctgctgtctggctacccctttcagtgcttgggctttactcctgagcatcaacgggacttcattgcccgggatttggggccaacactggccaacagcacccaccacaatgtaagactcctcattctggatgaccagaggctgctgctccctcattgggccaaggtggtgttgacaaacccagaagctgccaaatatgttcatggcatcgctgtccactggtacctggattttttggcccctgccaagtggactctgggagagacccacagactcttccccaataccacactgtttgcatcagaagcctgcgtggggagcaaattctgggagcagtctgttaggctgggttcctgggatcggggcatgcaatattcccatagtataataactaacctcctctaccacgtggtaggatggacagactggaatctggctttgaacccagaaggaggccccaattgggtgcgcaactttgttgacagccccatcattgtggatatcacaaaggacaccttctacaaacagcctatgttctatcatctggggcactttagcaagttcattccagagggttccactagagtaggcttggttgcctcacagaagaatgatctggatgctgtggcactcctgcatcctgacgggagtgcagtggtggtagtactgaacaggtctagcaaagatgttcccttgactatcaaagacccagctgtgggctttctggaaaccatttcccctggatactctatccacacctatctctggagaagacag

SEQ ID NO: 1054 - protein, 536 aa, synthetic construct
  REGION 1..536: note = Variant of B-Glucocerebrosidase
MEFSSPSREECPKPLSRVSIMAGSLTGLLLLQAVSWASGARPCIPKSFGYSSVVCVCNATYCDSVDPLTLPALGTFSRYESTRSGRRMELSMGPIQANRNGTGLLLTLQPEQKFQKVKGFGGAMTDAAALNILALSPPAQNLLLKSYFSEEGIEYNIIRVPMASCDFSIRTYTYADTPDDFQLHNFSLPEEDTKWKIPLIHRALQLSQRPVSLFASPWTSPTWLKTNGAYNGKGSLKGQPGDIYHQTWARYFVKFLDAYAEHGLQFWAVTAENEPSAGLLSGYPFQCLGFTPEHQRDFIARDLGPTLANSTHHNVRLLILDDQRLLLPHWAKVVLTNPEAAKYVHGIAVHWYLDFLAPAKWTLGETHRLFPNTTLFASEACVGSKFWEQSVRLGSWDRGMQYSHSIITNLLYHVVGWTDWNLALNPEGGPNWVRNFVDSPIIVDITKDTFYKQPMFYHLGHFSKFIPEGSTRVGLVASQKNDLDAVALLHPDGSAVVVVLNRSSKDVPLTIKDPAVGFLETISPGYSIHTYLWRRQ

SEQ ID NO: 1055 - DNA, 1608 bp, synthetic construct
  misc_feature 1..1608: note = Variant of B-Glucocerebrosidase
  source 1..1608: mol_type = other DNA
atggagttttcttctcctagtagagaagaatgccccaagccactgagcagggtgagcatcatggctggatccctcacagggctgcttcttttgcaggcagtctcatgggcctctggagccaggccctgtattcccaagtcattcggctactcctcagtggtgtgtgtatgcaatgccacctattgtgacagtgtcgatcctctcactctccctgctctgggtaccttctcccggtatgagagcacaagaagtggaagacgcatggagctctcaatgggccctatacaggctaaccgcactgggacaggtctgctgctgaccctccaacctgaacagaagtttcagaaagtcaagggatttggaggagccatgactgatgcagcagcactcaacatcttggccctgtctccaccagcccagaacctgctgttgaagtcctacttctcagaggaggggattgagtacaacatcatccgggttcccatggctagctgtgacttctccattaggacctatacatacgctgacacccccgatgattttcagctcgtgaatttcagtctccctgaagaagacaccaaatggaagatacctctgattcacagagccttgcaactgtcccaaaggccagtgagcctcttcgcttctccctggactagtcctacatggctgaagactaatggtgcttacaatgggaagggctccctgaaaggacagccaggtgacatatatcatcagacatgggcccgctactttgtgaaattccttgatgcctatgcagagcacgggctccaattctgggcagtcaccgcagaaaacgagccctcagctgggctgctgtctggctacccctttcagtgcttgggctttactcctgagcatcaacgggacttcattgcccgggatttggggccaacactggccaacagcacccaccacaatgtaagactcctcattctggatgaccagaggctgctgctccctcattgggccaaggtggtgttgacaaacccagaagctgccaaatatgttcatggcatcgctgtccactggtacctggattttttggcccctgccaagtggactctgggagagacccacagactcttccccaataccacactgtttgcatcagaagcctgcgtggggagcaaattctgggagcagtctgttaggctgggttcctgggatcggggcatgcaatattcccatagtataataactaacctcctctaccacgtggtaggatggacagactggaatctggctttgaacccagaaggaggccccaattgggtgcgcaactttgttgacagccccatcattgtggatatcacaaaggacaccttctacaaacagcctatgttctatcatctggggcactttagcaagttcattccagagggttccactagagtaggcttggttgcctcacagaagaatgatctggatgctgtggcactcctgcatcctgacgggagtgcagtggtggtagtactgaacaggtctagcaaagatgttcccttgactatcaaagacccagctgtgggctttctggaaaccatttcccctggatactctatccacacctatctctggagaagacag

SEQ ID NO: 1056 - protein, 536 aa, synthetic construct
  REGION 1..536: note = Variant of B-Glucocerebrosidase
MEFSSPSREECPKPLSRVSIMAGSLTGLLLLQAVSWASGARPCIPKSFGYSSVVCVCNATYCDSVDPLTLPALGTFSRYESTRSGRRMELSMGPIQANRTGTGLLLTLQPEQKFQKVKGFGGAMTDAAALNILALSPPAQNLLLKSYFSEEGIEYNIIRVPMASCDFSIRTYTYADTPDDFQLVNFSLPEEDTKWKIPLIHRALQLSQRPVSLFASPWTSPTWLKTNGAYNGKGSLKGQPGDIYHQTWARYFVKFLDAYAEHGLQFWAVTAENEPSAGLLSGYPFQCLGFTPEHQRDFIARDLGPTLANSTHHNVRLLILDDQRLLLPHWAKVVLTNPEAAKYVHGIAVHWYLDFLAPAKWTLGETHRLFPNTTLFASEACVGSKFWEQSVRLGSWDRGMQYSHSIITNLLYHVVGWTDWNLALNPEGGPNWVRNFVDSPIIVDITKDTFYKQPMFYHLGHFSKFIPEGSTRVGLVASQKNDLDAVALLHPDGSAVVVVLNRSSKDVPLTIKDPAVGFLETISPGYSIHTYLWRRQ

SEQ ID NO: 1057 - DNA, 1608 bp, synthetic construct
  misc_feature 1..1608: note = Variant of B-Glucocerebrosidase
  source 1..1608: mol_type = other DNA
atggagttttcttctcctagtagagaagaatgccccaagccactgagcagggtgagcatcatggctggatccctcacagggctgcttcttttgcaggcagtctcatgggcctctggagccaggccctgtattcccaagtcattcggctactcctcagtggtgtgtgtatgcaatgccacctattgtgacagtgtcgatcctctcactctccctgctctgggtaccttctcccggtatgagagcacaagaagtggaagacgcatggagctctcaatgggccctatacaggctaaccgcactgggacaggtctgctgctgaccctccaacctgaacagaagtttcagaaagtcaagggatttggaggagccatgactgatgcagcagcactcaacatcttggccctgtctccaccagcccagaacctgctgttgaagtcctacttctcagaggaggggattgagtacaacatcatccgggttcccatggctagctgtgacttctccattaggacctatacatacgctgacacccccgatgattttcagctccataatttcagtctccctgaagaagacaccaaatggaagatacctctgattcacagagccttgcaactgtcccaaaggccagtgagcctcttcgcttctccctggactagtcctacatggctgaagactaatggtgcttacaatgggaagggctccctgaaaggacagccaggtgacatatatcatcagacatgggcccgctactttgtgaaattccttgatgcctatgcagagcacgggctccaattctgggcagtcaccgcagaaaacgagccctcagctgggctgctgtctggctacccctttcagtgcttgggctttactcctgagcatcaacgggacttcattgcccgggatttggggccaacactggccaacagcacccaccacaatgtaagactcctcattctggatgaccagaggctgctgctccctcattgggccaaggtggtgttgacaaacccagaagctgccaaatatgttcatggcatcgctgtccactggtacctggattttttggcccctgccaagtggactctgggagagacccacagactcttccccaataccacactgtttgcatcagaagcctgcgtggggagccatttctgggagcagtctgttaggctgggttcctgggatcggggcatgcaatattcccatagtataataactaacctcctctaccacgtggtaggatggacagactggaatctggctttgaacccagaaggaggccccaattgggtgcgcaactttgttgacagccccatcattgtggatatcacaaaggacaccttctacaaacagcctatgttctatcatctggggcactttagcaagttcattccagagggttccactagagtaggcttggttgcctcacagaagaatgatctggatgctgtggcactcctgcatcctgacgggagtgcagtggtggtagtactgaacaggtctagcaaagatgttcccttgactatcaaagacccagctgtgggctttctggaaaccatttcccctggatactctatccacacctatctctggagaagacag

SEQ ID NO: 1058 - protein, 536 aa, synthetic construct
  REGION 1..536: note = Variant of B-Glucocerebrosidase
MEFSSPSREECPKPLSRVSIMAGSLTGLLLLQAVSWASGARPCIPKSFGYSSVVCVCNATYCDSVDPLTLPALGTFSRYESTRSGRRMELSMGPIQANRTGTGLLLTLQPEQKFQKVKGFGGAMTDAAALNILALSPPAQNLLLKSYFSEEGIEYNIIRVPMASCDFSIRTYTYADTPDDFQLHNFSLPEEDTKWKIPLIHRALQLSQRPVSLFASPWTSPTWLKTNGAYNGKGSLKGQPGDIYHQTWARYFVKFLDAYAEHGLQFWAVTAENEPSAGLLSGYPFQCLGFTPEHQRDFIARDLGPTLANSTHHNVRLLILDDQRLLLPHWAKVVLTNPEAAKYVHGIAVHWYLDFLAPAKWTLGETHRLFPNTTLFASEACVGSHFWEQSVRLGSWDRGMQYSHSIITNLLYHVVGWTDWNLALNPEGGPNWVRNFVDSPIIVDITKDTFYKQPMFYHLGHFSKFIPEGSTRVGLVASQKNDLDAVALLHPDGSAVVVVLNRSSKDVPLTIKDPAVGFLETISPGYSIHTYLWRRQ

SEQ ID NO: 1059 - DNA, 1608 bp, synthetic construct
  misc_feature 1..1608: note = Variant of B-Glucocerebrosidase
  source 1..1608: mol_type = other DNA
atggagttttcttctcctagtagagaagaatgccccaagccactgagcagggtgagcatcatggctggatccctcacagggctgcttcttttgcaggcagtctcatgggcctctggagccaggccctgtattcccaagtcattcggctactcctcagtggtgtgtgtatgcaatgccacctattgtgacagtgtcgatcctctcactctccctgctctgggtaccttctcccggtatgagagcagcagaagtggaagacgcatggagctctcaatgggccctatacaggctaaccgcactgggacaggtctgctgctgaccctccaacctgaacagaagtttcagaaagtcaagggatttggaggagccatgactgatgcagcagcactcaacatcttggccctgtctccaccagcccagaacctgctgttgaagtcctacttctcagaggaggggattgagtacaacatcatccgggttcccatggctagctgtgacttctccattaggacctatacatacgctgacacccccgatgattttcagctccataatttcagtctccctgaagaagacaccaaatggaagatacctctgattcacagagccttgcaactgtcccaaaggccagtgagcctcttcgcttctccctggactagtcctacatggctgaagactaatggtgcttacaatgggaagggctccctgaaaggacagccaggtgacatatatcatcagacatgggcccgctactttgtgaaattccttgatgcctatgcagagcacgggctccaattctgggcagtcaccgcagaaaacgagccctcagctgggctgctgtctggctacccctttcagtgcttgggctttactcctgagcatcaacgggacttcattgcccgggatttggggccaacactggccaacagcacccaccacaatgtaagactcctcattctggatgaccagaggctgctgctccctcattgggccaaggtggtgttgacaaacccagaagctgccaaatatgttcatggcatcgctgtccactggtacctggattttttggcccctgccaagtggactctgggagagacccacagactcttccccaataccacactgtttgcatcagaagcctgcgtggggagcaaattctgggagcagtctgttaggctgggttcctgggatcggggcatgcaatattcccatagtataataactaacctcctctaccacgtggtaggatggacagactggaatctggctttgaacccagaaggaggccccaattgggtgcgcaactttgttgacagccccatcattgtggatatcacaaaggacaccttctacaaacagcctatgttctatcatctggggcactttagcaagttcattccagagggttccactagagtaggcttggttgcctcacagaagaatgatctggatgctgtggcactcctgcatcctgacgggagtgcagtggtggtagtactgaacaggtctagcaaagatgttcccttgactatcaaagacccagctgtgggctttctggaaaccatttcccctggatactctatccacacctatctctggagaagacag

SEQ ID NO: 1060 - protein, 536 aa, synthetic construct
  REGION 1..536: note = Variant of B-Glucocerebrosidase
MEFSSPSREECPKPLSRVSIMAGSLTGLLLLQAVSWASGARPCIPKSFGYSSVVCVCNATYCDSVDPLTLPALGTFSRYESSRSGRRMELSMGPIQANRTGTGLLLTLQPEQKFQKVKGFGGAMTDAAALNILALSPPAQNLLLKSYFSEEGIEYNIIRVPMASCDFSIRTYTYADTPDDFQLHNFSLPEEDTKWKIPLIHRALQLSQRPVSLFASPWTSPTWLKTNGAYNGKGSLKGQPGDIYHQTWARYFVKFLDAYAEHGLQFWAVTAENEPSAGLLSGYPFQCLGFTPEHQRDFIARDLGPTLANSTHHNVRLLILDDQRLLLPHWAKVVLTNPEAAKYVHGIAVHWYLDFLAPAKWTLGETHRLFPNTTLFASEACVGSKFWEQSVRLGSWDRGMQYSHSIITNLLYHVVGWTDWNLALNPEGGPNWVRNFVDSPIIVDITKDTFYKQPMFYHLGHFSKFIPEGSTRVGLVASQKNDLDAVALLHPDGSAVVVVLNRSSKDVPLTIKDPAVGFLETISPGYSIHTYLWRRQ

SEQ ID NO: 1061 - DNA, 1608 bp, synthetic construct
  misc_feature 1..1608: note = Variant of B-Glucocerebrosidase
  source 1..1608: mol_type = other DNA
atggagttttcttctcctagtagagaagaatgccccaagccactgagcagggtgagcatcatggctggatccctcacagggctgcttcttttgcaggcagtctcatgggcctctggagccaggccctgtattcccaagtcattcggctactcctcagtggtgtgtgtatgcaatgccacctattgtgacagtgtcgatcctctcactctccctgctctgggtgctttctcccggtatgagagcacaagaagtggaagacgcatggagctctcaatgggccctatacaggctaaccgcactgggacaggtctgctgctgaccctccaacctgaacagaagtttcagaaagtcaagggatttggaggagccatgactgatgcagcagcactcaacatcttggccctgtctccaccagcccagaacctgctgttgaagtcctacttctcagaggaggggattgagtacaacatcatccgggttcccatggctagctgtgacttctccattaggacctatacatacgctgacacccccgatgattttcagctccataatttcagtctccctgaagaagacaccaaatggaagatacctctgattcacagagccttgcaactgtcccaaaggccagtgagcctcttcgcttctccctggactagtcctacatggctgaagactaatggtgcttacaatgggaagggctccctgaaaggacagccaggtgacatatatcatcagacatgggcccgctactttgtgaaattccttgatgcctatgcagagcacgggctccaattctgggcagtcaccgcagaaaacgagccctcagctgggctgctgtctggctacccctttcagtgcttgggctttactcctgagcatcaacgggacttcattgcccgggatttggggccaacactggccaacagcacccaccacaatgtaagactcctcattctggatgaccagaggctgctgctccctcattgggccaaggtggtgttgacaaacccagaagctgccaaatatgttcatggcatcgctgtccactggtacctggattttttggcccctgccaagtggactctgggagagacccacagactcttccccaataccacactgtttgcatcagaagcctgcgtggggagcaaattctgggagcagtctgttaggctgggttcctgggatcggggcatgcaatattcccatagtataataactaacctcctctaccacgtggtaggatggacagactggaatctggctttgaacccagaaggaggccccaattgggtgcgcaactttgttgacagccccatcattgtggatatcacaaaggacaccttctacaaacagcctatgttctatcatctggggcactttagcaagttcattccagagggttccactagagtaggcttggttgcctcacagaagaatgatctggatgctgtggcactcctgcatcctgacgggagtgcagtggtggtagtactgaacaggtctagcaaagatgttcccttgactatcaaagacccagctgtgggctttctggaaaccatttcccctggatactctatccacacctatctctggagaagacag

SEQ ID NO: 1062 - protein, 536 aa, synthetic construct
  REGION 1..536: note = Variant of B-Glucocerebrosidase
MEFSSPSREECPKPLSRVSIMAGSLTGLLLLQAVSWASGARPCIPKSFGYSSVVCVCNATYCDSVDPLTLPALGAFSRYESTRSGRRMELSMGPIQANRTGTGLLLTLQPEQKFQKVKGFGGAMTDAAALNILALSPPAQNLLLKSYFSEEGIEYNIIRVPMASCDFSIRTYTYADTPDDFQLHNFSLPEEDTKWKIPLIHRALQLSQRPVSLFASPWTSPTWLKTNGAYNGKGSLKGQPGDIYHQTWARYFVKFLDAYAEHGLQFWAVTAENEPSAGLLSGYPFQCLGFTPEHQRDFIARDLGPTLANSTHHNVRLLILDDQRLLLPHWAKVVLTNPEAAKYVHGIAVHWYLDFLAPAKWTLGETHRLFPNTTLFASEACVGSKFWEQSVRLGSWDRGMQYSHSIITNLLYHVVGWTDWNLALNPEGGPNWVRNFVDSPIIVDITKDTFYKQPMFYHLGHFSKFIPEGSTRVGLVASQKNDLDAVALLHPDGSAVVVVLNRSSKDVPLTIKDPAVGFLETISPGYSIHTYLWRRQ

SEQ ID NO: 1063 - DNA, 1608 bp, synthetic construct
  misc_feature 1..1608: note = Variant of B-Glucocerebrosidase
  source 1..1608: mol_type = other DNA
atggagttttcttctcctagtagagaagaatgccccaagccactgagcagggtgagcatcatggctggatccctcacagggctgcttcttttgcaggcagtctcatgggcctctggagccaggccctgtattcccaagtcattcggctactcctcagtggtgtgtgtatgcaatgccacctattgtgacagtgtcgatcctctcactctcacagctctgggtaccttctcccggtatgagagcacaagaagtggaagacgcatggagctctcaatgggccctatacaggctaaccgcactgggacaggtctgctgctgaccctccaacctgaacagaagtttcagaaagtcaagggatttggaggagccatgactgatgcagcagcactcaacatcttggccctgtctccaccagcccagaacctgctgttgaagtcctacttctcagaggaggggattgagtacaacatcatccgggttcccatggctagctgtgacttctccattaggacctatacatacgctgacacccccgatgattttcagctccataatttcagtctccctgaagaagacaccaaatggaagatacctctgattcacagagccttgcaactgtcccaaaggccagtgagcctcttcgcttctccctggactagtcctacatggctgaagactaatggtgcttacaatgggaagggctccctgaaaggacagccaggtgacatatatcatcagacatgggcccgctactttgtgaaattccttgatgcctatgcagagcacgggctccaattctgggcagtcaccgcagaaaacgagccctcagctgggctgctgtctggctacccctttcagtgcttgggctttactcctgagcatcaacgggacttcattgcccgggatttggggccaacactggccaacagcacccaccacaatgtaagactcctcattctggatgaccagaggctgctgctccctcattgggccaaggtggtgttgacaaacccagaagctgccaaatatgttcatggcatcgctgtccactggtacctggattttttggcccctgccaagtggactctgggagagacccacagactcttccccaataccacactgtttgcatcagaagcctgcgtggggagcaaattctgggagcagtctgttaggctgggttcctgggatcggggcatgcaatattcccatagtataataactaacctcctctaccacgtggtaggatggacagactggaatctggctttgaacccagaaggaggccccaattgggtgcgcaactttgttgacagccccatcattgtggatatcacaaaggacaccttctacaaacagcctatgttctatcatctggggcactttagcaagttcattccagagggttccactagagtaggcttggttgcctcacagaagaatgatctggatgctgtggcactcctgcatcctgacgggagtgcagtggtggtagtactgaacaggtctagcaaagatgttcccttgactatcaaagacccagctgtgggctttctggaaaccatttcccctggatactctatccacacctatctctggagaagacag

SEQ ID NO: 1064 - protein, 536 aa, synthetic construct
  REGION 1..536: note = Variant of B-Glucocerebrosidase
MEFSSPSREECPKPLSRVSIMAGSLTGLLLLQAVSWASGARPCIPKSFGYSSVVCVCNATYCDSVDPLTLTALGTFSRYESTRSGRRMELSMGPIQANRTGTGLLLTLQPEQKFQKVKGFGGAMTDAAALNILALSPPAQNLLLKSYFSEEGIEYNIIRVPMASCDFSIRTYTYADTPDDFQLHNFSLPEEDTKWKIPLIHRALQLSQRPVSLFASPWTSPTWLKTNGAYNGKGSLKGQPGDIYHQTWARYFVKFLDAYAEHGLQFWAVTAENEPSAGLLSGYPFQCLGFTPEHQRDFIARDLGPTLANSTHHNVRLLILDDQRLLLPHWAKVVLTNPEAAKYVHGIAVHWYLDFLAPAKWTLGETHRLFPNTTLFASEACVGSKFWEQSVRLGSWDRGMQYSHSIITNLLYHVVGWTDWNLALNPEGGPNWVRNFVDSPIIVDITKDTFYKQPMFYHLGHFSKFIPEGSTRVGLVASQKNDLDAVALLHPDGSAVVVVLNRSSKDVPLTIKDPAVGFLETISPGYSIHTYLWRRQ

SEQ ID NO: 1065 - DNA, 1608 bp, synthetic construct
  misc_feature 1..1608: note = Variant of B-Glucocerebrosidase
  source 1..1608: mol_type = other DNA
atggagttttcttctcctagtagagaagaatgccccaagccactgagcagggtgagcatcatggctggatccctcacagggctgcttcttttgcaggcagtctcatgggcctctggagcccatccctgtattcccaagtcattcggctactcctcagtggtgtgtgtatgcaatgccacctattgtgacagtgtcgatcctctcactctccctgctctgggtaccttctcccggtatgagagcacaagaagtggaagacgcatggagctctcaatgggccctatacaggctaaccgcactgggacaggtctgctgctgaccctccaacctgaacagaagtttcagaaagtcaagggatttggaggagccatgactgatgcagcagcactcaacatcttggccctgtctccaccagcccagaacctgctgttgaagtcctacttctcagaggaggggattgagtacaacatcatccgggttcccatggctagctgtgacttctccattaggacctatacatacgctgacacccccgatgattttcagctccataatttcagtctccctgaagaagacaccaaatggaagatacctctgattcacagagccttgcaactgtcccaaaggccagtgagcctcttcgcttctccctggactagtcctacatggctgaagactaatggtgcttacaatgggaagggctccctgaaaggacagccaggtgacatatatcatcagacatgggcccgctactttgtgaaattccttgatgcctatgcagagcacgggctccaattctgggcagtcaccgcagaaaacgagccctcagctgggctgctgtctggctacccctttcagtgcttgggctttactcctgagcatcaacgggacttcattgcccgggatttggggccaacactggccaacagcacccaccacaatgtaagactcctcattctggatgaccagaggctgctgctccctcattgggccaaggtggtgttgacaaacccagaagctgccaaatatgttcatggcatcgctgtccactggtacctggattttttggcccctgccaagtggactctgggagagacccacagactcttccccaataccacactgtttgcatcagaagcctgcgtggggagcaaattctgggagcagtctgttaggctgggttcctgggatcggggcatgcaatattcccatagtataataactaacctcctctaccacgtggtaggatggacagactggaatctggctttgaacccagaaggaggccccaattgggtgcgcaactttgttgacagccccatcattgtggatatcacaaaggacaccttctacaaacagcctatgttctatcatctggggcactttagcaagttcattccagagggttccactagagtaggcttggttgcctcacagaagaatgatctggatgctgtggcactcctgcatcctgacgggagtgcagtggtggtagtactgaacaggtctagcaaagatgttcccttgactatcaaagacccagctgtgggctttctggaaaccatttcccctggatactctatccacacctatctctggagaagacag

SEQ ID NO: 1066 - protein, 536 aa, synthetic construct
  REGION 1..536: note = Variant of B-Glucocerebrosidase
MEFSSPSREECPKPLSRVSIMAGSLTGLLLLQAVSWASGAHPCIPKSFGYSSVVCVCNATYCDSVDPLTLPALGTFSRYESTRSGRRMELSMGPIQANRTGTGLLLTLQPEQKFQKVKGFGGAMTDAAALNILALSPPAQNLLLKSYFSEEGIEYNIIRVPMASCDFSIRTYTYADTPDDFQLHNFSLPEEDTKWKIPLIHRALQLSQRPVSLFASPWTSPTWLKTNGAYNGKGSLKGQPGDIYHQTWARYFVKFLDAYAEHGLQFWAVTAENEPSAGLLSGYPFQCLGFTPEHQRDFIARDLGPTLANSTHHNVRLLILDDQRLLLPHWAKVVLTNPEAAKYVHGIAVHWYLDFLAPAKWTLGETHRLFPNTTLFASEACVGSKFWEQSVRLGSWDRGMQYSHSIITNLLYHVVGWTDWNLALNPEGGPNWVRNFVDSPIIVDITKDTFYKQPMFYHLGHFSKFIPEGSTRVGLVASQKNDLDAVALLHPDGSAVVVVLNRSSKDVPLTIKDPAVGFLETISPGYSIHTYLWRRQ

SEQ ID NO: 1067 - DNA, 1608 bp, synthetic construct
  misc_feature 1..1608: note = Variant of B-Glucocerebrosidase
  source 1..1608: mol_type = other DNA
atggagttttcttctcctagtagagaagaatgccccaagccactgagcagggtgagcatcatggctggatccctcacagggctgcttcttttgcaggcagtctcatgggcctctggagccaggccctgtattcccaagtcattcggctactcctcagtggtgtgtgtatgcaatgccacctattgtgacagtgtcgatcctctcactctccctgctctgggtaccttctcccggtatgagagcacaagaagtggaagacgcatggagctctcaatgggccctatacagaagaaccgcactgggacaggtctgctgctgaccctccaacctgaacagaagtttcagaaagtcaagggatttggaggagccatgactgatgcagcagcactcaacatcttggccctgtctccaccagcccagaacctgctgttgaagtcctacttctcagaggaggggattgagtacaacatcatccgggttcccatggctagctgtgacttctccattaggacctatacatacgctgacacccccgatgattttcagctccataatttcagtctccctgaagaagacaccaaatggaagatacctctgattcacagagccttgcaactgtcccaaaggccagtgagcctcttcgcttctccctggactagtcctacatggctgaagactaatggtgcttacaatgggaagggctccctgaaaggacagccaggtgacatatatcatcagacatgggcccgctactttgtgaaattccttgatgcctatgcagagcacgggctccaattctgggcagtcaccgcagaaaacgagccctcagctgggctgctgtctggctacccctttcagtgcttgggctttactcctgagcatcaacgggacttcattgcccgggatttggggccaacactggccaacagcacccaccacaatgtaagactcctcattctggatgaccagaggctgctgctccctcattgggccaaggtggtgttgacaaacccagaagctgccaaatatgttcatggcatcgctgtccactggtacctggattttttggcccctgccaagtggactctgggagagacccacagactcttccccaataccacactgtttgcatcagaagcctgcgtggggagcaaattctgggagcagtctgttaggctgggttcctgggatcggggcatgcaatattcccatagtataataactaacctcctctaccacgtggtaggatggacagactggaatctggctttgaacccagaaggaggccccaattgggtgcgcaactttgttgacagccccatcattgtggatatcacaaaggacaccttctacaaacagcctatgttctatcatctggggcactttagcaagttcattccagagggttccactagagtaggcttggttgcctcacagaagaatgatctggatgctgtggcactcctgcatcctgacgggagtgcagtggtggtagtactgaacaggtctagcaaagatgttcccttgactatcaaagacccagctgtgggctttctggaaaccatttcccctggatactctatccacacctatctctggagaagacag

SEQ ID NO: 1068 - protein, 536 aa, synthetic construct
  REGION 1..536: note = Variant of B-Glucocerebrosidase
MEFSSPSREECPKPLSRVSIMAGSLTGLLLLQAVSWASGARPCIPKSFGYSSVVCVCNATYCDSVDPLTLPALGTFSRYESTRSGRRMELSMGPIQKNRTGTGLLLTLQPEQKFQKVKGFGGAMTDAAALNILALSPPAQNLLLKSYFSEEGIEYNIIRVPMASCDFSIRTYTYADTPDDFQLHNFSLPEEDTKWKIPLIHRALQLSQRPVSLFASPWTSPTWLKTNGAYNGKGSLKGQPGDIYHQTWARYFVKFLDAYAEHGLQFWAVTAENEPSAGLLSGYPFQCLGFTPEHQRDFIARDLGPTLANSTHHNVRLLILDDQRLLLPHWAKVVLTNPEAAKYVHGIAVHWYLDFLAPAKWTLGETHRLFPNTTLFASEACVGSKFWEQSVRLGSWDRGMQYSHSIITNLLYHVVGWTDWNLALNPEGGPNWVRNFVDSPIIVDITKDTFYKQPMFYHLGHFSKFIPEGSTRVGLVASQKNDLDAVALLHPDGSAVVVVLNRSSKDVPLTIKDPAVGFLETISPGYSIHTYLWRRQ

SEQ ID NO: 1069 - DNA, 1608 bp, synthetic construct
  misc_feature 1..1608: note = Variant of B-Glucocerebrosidase
  source 1..1608: mol_type = other DNA
atggagttttcttctcctagtagagaagaatgccccaagccactgagcagggtgagcatcatggctggatccctcacagggctgcttcttttgcaggcagtctcatgggcctctggagccaggccctgtattcccaagtcattcggctactcctcagtggtgtgtgtatgcaatgccacctattgtgacagtgtcgatcctctcactctccctgctctgggtaccttctcccggtatgagagcacaagaagtggaagacgcatggagctctcaatgggccctatacaggctaacgagactgggacaggtctgctgctgaccctccaacctgaacagaagtttcagaaagtcaagggatttggaggagccatgactgatgcagcagcactcaacatcttggccctgtctccaccagcccagaacctgctgttgaagtcctacttctcagaggaggggattgagtacaacatcatccgggttcccatggctagctgtgacttctccattaggacctatacatacgctgacacccccgatgattttcagctccataatttcagtctccctgaagaagacaccaaatggaagatacctctgattcacagagccttgcaactgtcccaaaggccagtgagcctcttcgcttctccctggactagtcctacatggctgaagactaatggtgcttacaatgggaagggctccctgaaaggacagccaggtgacatatatcatcagacatgggcccgctactttgtgaaattccttgatgcctatgcagagcacgggctccaattctgggcagtcaccgcagaaaacgagccctcagctgggctgctgtctggctacccctttcagtgcttgggctttactcctgagcatcaacgggacttcattgcccgggatttggggccaacactggccaacagcacccaccacaatgtaagactcctcattctggatgaccagaggctgctgctccctcattgggccaaggtggtgttgacaaacccagaagctgccaaatatgttcatggcatcgctgtccactggtacctggattttttggcccctgccaagtggactctgggagagacccacagactcttccccaataccacactgtttgcatcagaagcctgcgtggggagcaaattctgggagcagtctgttaggctgggttcctgggatcggggcatgcaatattcccatagtataataactaacctcctctaccacgtggtaggatggacagactggaatctggctttgaacccagaaggaggccccaattgggtgcgcaactttgttgacagccccatcattgtggatatcacaaaggacaccttctacaaacagcctatgttctatcatctggggcactttagcaagttcattccagagggttccactagagtaggcttggttgcctcacagaagaatgatctggatgctgtggcactcctgcatcctgacgggagtgcagtggtggtagtactgaacaggtctagcaaagatgttcccttgactatcaaagacccagctgtgggctttctggaaaccatttcccctggatactctatccacacctatctctggagaagacag

SEQ ID NO: 1070 - protein, 536 aa, synthetic construct
  REGION 1..536: note = Variant of B-Glucocerebrosidase
MEFSSPSREECPKPLSRVSIMAGSLTGLLLLQAVSWASGARPCIPKSFGYSSVVCVCNATYCDSVDPLTLPALGTFSRYESTRSGRRMELSMGPIQANETGTGLLLTLQPEQKFQKVKGFGGAMTDAAALNILALSPPAQNLLLKSYFSEEGIEYNIIRVPMASCDFSIRTYTYADTPDDFQLHNFSLPEEDTKWKIPLIHRALQLSQRPVSLFASPWTSPTWLKTNGAYNGKGSLKGQPGDIYHQTWARYFVKFLDAYAEHGLQFWAVTAENEPSAGLLSGYPFQCLGFTPEHQRDFIARDLGPTLANSTHHNVRLLILDDQRLLLPHWAKVVLTNPEAAKYVHGIAVHWYLDFLAPAKWTLGETHRLFPNTTLFASEACVGSKFWEQSVRLGSWDRGMQYSHSIITNLLYHVVGWTDWNLALNPEGGPNWVRNFVDSPIIVDITKDTFYKQPMFYHLGHFSKFIPEGSTRVGLVASQKNDLDAVALLHPDGSAVVVVLNRSSKDVPLTIKDPAVGFLETISPGYSIHTYLWRRQ

SEQ ID NO: 1071 - DNA, 1608 bp, synthetic construct
  misc_feature 1..1608: note = Variant of B-Glucocerebrosidase
  source 1..1608: mol_type = other DNA
atggagttttcttctcctagtagagaagaatgccccaagccactgagcagggtgagcatcatggctggatccctcacagggctgcttcttttgcaggcagtctcatgggcctctggagccaggccctgtattcccaagtcattcggctactcctcagtggtgtgtgtatgcaatgccacctattgtgacagtgtcgatcctctcactctccctgctctgggtaccttctcccggtatgagagcacaagaagtggaagacgcatggagctctcaatgggccctatacagcagaaccgcactgggacaggtctgctgctgaccctccaacctgaacagaagtttcagaaagtcaagggatttggaggagccatgactgatgcagcagcactcaacatcttggccctgtctccaccagcccagaacctgctgttgaagtcctacttctcagaggaggggattgagtacaacatcatccgggttcccatggctagctgtgacttctccattaggacctatacatacgctgacacccccgatgattttcagctccataatttcagtctccctgaagaagacaccaaatggaagatacctctgattcacagagccttgcaactgtcccaaaggccagtgagcctcttcgcttctccctggactagtcctacatggctgaagactaatggtgcttacaatgggaagggctccctgaaaggacagccaggtgacatatatcatcagacatgggcccgctactttgtgaaattccttgatgcctatgcagagcacgggctccaattctgggcagtcaccgcagaaaacgagccctcagctgggctgctgtctggctacccctttcagtgcttgggctttactcctgagcatcaacgggacttcattgcccgggatttggggccaacactggccaacagcacccaccacaatgtaagactcctcattctggatgaccagaggctgctgctccctcattgggccaaggtggtgttgacaaacccagaagctgccaaatatgttcatggcatcgctgtccactggtacctggattttttggcccctgccaagtggactctgggagagacccacagactcttccccaataccacactgtttgcatcagaagcctgcgtggggagcaaattctgggagcagtctgttaggctgggttcctgggatcggggcatgcaatattcccatagtataataactaacctcctctaccacgtggtaggatggacagactggaatctggctttgaacccagaaggaggccccaattgggtgcgcaactttgttgacagccccatcattgtggatatcacaaaggacaccttctacaaacagcctatgttctatcatctggggcactttagcaagttcattccagagggttccactagagtaggcttggttgcctcacagaagaatgatctggatgctgtggcactcctgcatcctgacgggagtgcagtggtggtagtactgaacaggtctagcaaagatgttcccttgactatcaaagacccagctgtgggctttctggaaaccatttcccctggatactctatccacacctatctctggagaagacag

SEQ ID NO: 1072 - protein, 536 aa, synthetic construct
  REGION 1..536: note = Variant of B-Glucocerebrosidase
MEFSSPSREECPKPLSRVSIMAGSLTGLLLLQAVSWASGARPCIPKSFGYSSVVCVCNATYCDSVDPLTLPALGTFSRYESTRSGRRMELSMGPIQQNRTGTGLLLTLQPEQKFQKVKGFGGAMTDAAALNILALSPPAQNLLLKSYFSEEGIEYNIIRVPMASCDFSIRTYTYADTPDDFQLHNFSLPEEDTKWKIPLIHRALQLSQRPVSLFASPWTSPTWLKTNGAYNGKGSLKGQPGDIYHQTWARYFVKFLDAYAEHGLQFWAVTAENEPSAGLLSGYPFQCLGFTPEHQRDFIARDLGPTLANSTHHNVRLLILDDQRLLLPHWAKVVLTNPEAAKYVHGIAVHWYLDFLAPAKWTLGETHRLFPNTTLFASEACVGSKFWEQSVRLGSWDRGMQYSHSIITNLLYHVVGWTDWNLALNPEGGPNWVRNFVDSPIIVDITKDTFYKQPMFYHLGHFSKFIPEGSTRVGLVASQKNDLDAVALLHPDGSAVVVVLNRSSKDVPLTIKDPAVGFLETISPGYSIHTYLWRRQ

SEQ ID NO: 1073 - DNA, 1608 bp, synthetic construct
  misc_feature 1..1608: note = Variant of B-Glucocerebrosidase
  source 1..1608: mol_type = other DNA
atggagttttcttctcctagtagagaagaatgccccaagccactgagcagggtgagcatcatggctggatccctcacagggctgcttcttttgcaggcagtctcatgggcctctggagccaggccctgtattcccaagtcattcggctactcctcagtggtgtgtgtatgcaatgccacctattgtgacagtgtcgatcctctcactctccctgctctgggtaccttctcccggtatgagagcacaagaagtggaagacgcatggagctctcaatgggcaatatacaggctaaccgcactgggacaggtctgctgctgaccctccaacctgaacagaagtttcagaaagtcaagggatttggaggagccatgactgatgcagcagcactcaacatcttggccctgtctccaccagcccagaacctgctgttgaagtcctacttctcagaggaggggattgagtacaacatcatccgggttcccatggctagctgtgacttctccattaggacctatacatacgctgacacccccgatgattttcagctccataatttcagtctccctgaagaagacaccaaatggaagatacctctgattcacagagccttgcaactgtcccaaaggccagtgagcctcttcgcttctccctggactagtcctacatggctgaagactaatggtgcttacaatgggaagggctccctgaaaggacagccaggtgacatatatcatcagacatgggcccgctactttgtgaaattccttgatgcctatgcagagcacgggctccaattctgggcagtcaccgcagaaaacgagccctcagctgggctgctgtctggctacccctttcagtgcttgggctttactcctgagcatcaacgggacttcattgcccgggatttggggccaacactggccaacagcacccaccacaatgtaagactcctcattctggatgaccagaggctgctgctccctcattgggccaaggtggtgttgacaaacccagaagctgccaaatatgttcatggcatcgctgtccactggtacctggattttttggcccctgccaagtggactctgggagagacccacagactcttccccaataccacactgtttgcatcagaagcctgcgtggggagcaaattctgggagcagtctgttaggctgggttcctgggatcggggcatgcaatattcccatagtataataactaacctcctctaccacgtggtaggatggacagactggaatctggctttgaacccagaaggaggccccaattgggtgcgcaactttgttgacagccccatcattgtggatatcacaaaggacaccttctacaaacagcctatgttctatcatctggggcactttagcaagttcattccagagggttccactagagtaggcttggttgcctcacagaagaatgatctggatgctgtggcactcctgcatcctgacgggagtgcagtggtggtagtactgaacaggtctagcaaagatgttcccttgactatcaaagacccagctgtgggctttctggaaaccatttcccctggatactctatccacacctatctctggagaagacag

SEQ ID NO: 1074 - protein, 536 aa, synthetic construct
  REGION 1..536: note = Variant of B-Glucocerebrosidase
MEFSSPSREECPKPLSRVSIMAGSLTGLLLLQAVSWASGARPCIPKSFGYSSVVCVCNATYCDSVDPLTLPALGTFSRYESTRSGRRMELSMGNIQANRTGTGLLLTLQPEQKFQKVKGFGGAMTDAAALNILALSPPAQNLLLKSYFSEEGIEYNIIRVPMASCDFSIRTYTYADTPDDFQLHNFSLPEEDTKWKIPLIHRALQLSQRPVSLFASPWTSPTWLKTNGAYNGKGSLKGQPGDIYHQTWARYFVKFLDAYAEHGLQFWAVTAENEPSAGLLSGYPFQCLGFTPEHQRDFIARDLGPTLANSTHHNVRLLILDDQRLLLPHWAKVVLTNPEAAKYVHGIAVHWYLDFLAPAKWTLGETHRLFPNTTLFASEACVGSKFWEQSVRLGSWDRGMQYSHSIITNLLYHVVGWTDWNLALNPEGGPNWVRNFVDSPIIVDITKDTFYKQPMFYHLGHFSKFIPEGSTRVGLVASQKNDLDAVALLHPDGSAVVVVLNRSSKDVPLTIKDPAVGFLETISPGYSIHTYLWRRQ

SEQ ID NO: 1075 - DNA, 1608 bp, synthetic construct
  misc_feature 1..1608: note = Variant of B-Glucocerebrosidase
  source 1..1608: mol_type = other DNA
atggagttttcttctcctagtagagaagaatgccccaagccactgagcagggtgagcatcatggctggatccctcacagggctgcttcttttgcaggcagtctcatgggcctctggagccaggccctgtattcccaagtcattcggctactcctcagtggtgtgtgtatgcaatgccacctattgtgacagtgtcgatcctctcactctccctgctctgggtaccttctcccggtatgagagcacaagaagtggaagacgcatggagctctcaatgggccctatacaggctaaccgcagggggacaggtctgctgctgaccctccaacctgaacagaagtttcagaaagtcaagggatttggaggagccatgactgatgcagcagcactcaacatcttggccctgtctccaccagcccagaacctgctgttgaagtcctacttctcagaggaggggattgagtacaacatcatccgggttcccatggctagctgtgacttctccattaggacctatacatacgctgacacccccgatgattttcagctccataatttcagtctccctgaagaagacaccaaatggaagatacctctgattcacagagccttgcaactgtcccaaaggccagtgagcctcttcgcttctccctggactagtcctacatggctgaagactaatggtgcttacaatgggaagggctccctgaaaggacagccaggtgacatatatcatcagacatgggcccgctactttgtgaaattccttgatgcctatgcagagcacgggctccaattctgggcagtcaccgcagaaaacgagccctcagctgggctgctgtctggctacccctttcagtgcttgggctttactcctgagcatcaacgggacttcattgcccgggatttggggccaacactggccaacagcacccaccacaatgtaagactcctcattctggatgaccagaggctgctgctccctcattgggccaaggtggtgttgacaaacccagaagctgccaaatatgttcatggcatcgctgtccactggtacctggattttttggcccctgccaagtggactctgggagagacccacagactcttccccaataccacactgtttgcatcagaagcctgcgtggggagcaaattctgggagcagtctgttaggctgggttcctgggatcggggcatgcaatattcccatagtataataactaacctcctctaccacgtggtaggatggacagactggaatctggctttgaacccagaaggaggccccaattgggtgcgcaactttgttgacagccccatcattgtggatatcacaaaggacaccttctacaaacagcctatgttctatcatctggggcactttagcaagttcattccagagggttccactagagtaggcttggttgcctcacagaagaatgatctggatgctgtggcactcctgcatcctgacgggagtgcagtggtggtagtactgaacaggtctagcaaagatgttcccttgactatcaaagacccagctgtgggctttctggaaaccatttcccctggatactctatccacacctatctctggagaagacag

SEQ ID NO: 1076 - protein, 536 aa, synthetic construct
  REGION 1..536: note = Variant of B-Glucocerebrosidase
MEFSSPSREECPKPLSRVSIMAGSLTGLLLLQAVSWASGARPCIPKSFGYSSVVCVCNATYCDSVDPLTLPALGTFSRYESTRSGRRMELSMGPIQANRRGTGLLLTLQPEQKFQKVKGFGGAMTDAAALNILALSPPAQNLLLKSYFSEEGIEYNIIRVPMASCDFSIRTYTYADTPDDFQLHNFSLPEEDTKWKIPLIHRALQLSQRPVSLFASPWTSPTWLKTNGAYNGKGSLKGQPGDIYHQTWARYFVKFLDAYAEHGLQFWAVTAENEPSAGLLSGYPFQCLGFTPEHQRDFIARDLGPTLANSTHHNVRLLILDDQRLLLPHWAKVVLTNPEAAKYVHGIAVHWYLDFLAPAKWTLGETHRLFPNTTLFASEACVGSKFWEQSVRLGSWDRGMQYSHSIITNLLYHVVGWTDWNLALNPEGGPNWVRNFVDSPIIVDITKDTFYKQPMFYHLGHFSKFIPEGSTRVGLVASQKNDLDAVALLHPDGSAVVVVLNRSSKDVPLTIKDPAVGFLETISPGYSIHTYLWRRQ

SEQ ID NO: 1077 - DNA, 1608 bp, synthetic construct
  misc_feature 1..1608: note = Variant of B-Glucocerebrosidase
  source 1..1608: mol_type = other DNA
atggagttttcttctcctagtagagaagaatgccccaagccactgagcagggtgagcatcatggctggatccctcacagggctgcttcttttgcaggcagtctcatgggcctctggagccaggccctgtattcccaagtcattcggctactcctcagtggtgtgtgtatgcaatgccacctattgtgacagtgtcgatcctctcactctccctgctctgggtaccttctcccggtatgagagcacaagaagtggaagacgcatggagctctcagcaggccctatacaggctaaccgcactgggacaggtctgctgctgaccctccaacctgaacagaagtttcagaaagtcaagggatttggaggagccatgactgatgcagcagcactcaacatcttggccctgtctccaccagcccagaacctgctgttgaagtcctacttctcagaggaggggattgagtacaacatcatccgggttcccatggctagctgtgacttctccattaggacctatacatacgctgacacccccgatgattttcagctccataatttcagtctccctgaagaagacaccaaatggaagatacctctgattcacagagccttgcaactgtcccaaaggccagtgagcctcttcgcttctccctggactagtcctacatggctgaagactaatggtgcttacaatgggaagggctccctgaaaggacagccaggtgacatatatcatcagacatgggcccgctactttgtgaaattccttgatgcctatgcagagcacgggctccaattctgggcagtcaccgcagaaaacgagccctcagctgggctgctgtctggctacccctttcagtgcttgggctttactcctgagcatcaacgggacttcattgcccgggatttggggccaacactggccaacagcacccaccacaatgtaagactcctcattctggatgaccagaggctgctgctccctcattgggccaaggtggtgttgacaaacccagaagctgccaaatatgttcatggcatcgctgtccactggtacctggattttttggcccctgccaagtggactctgggagagacccacagactcttccccaataccacactgtttgcatcagaagcctgcgtggggagcaaattctgggagcagtctgttaggctgggttcctgggatcggggcatgcaatattcccatagtataataactaacctcctctaccacgtggtaggatggacagactggaatctggctttgaacccagaaggaggccccaattgggtgcgcaactttgttgacagccccatcattgtggatatcacaaaggacaccttctacaaacagcctatgttctatcatctggggcactttagcaagttcattccagagggttccactagagtaggcttggttgcctcacagaagaatgatctggatgctgtggcactcctgcatcctgacgggagtgcagtggtggtagtactgaacaggtctagcaaagatgttcccttgactatcaaagacccagctgtgggctttctggaaaccatttcccctggatactctatccacacctatctctggagaagacag

SEQ ID NO: 1078 - protein, 536 aa, synthetic construct
  REGION 1..536: note = Variant of B-Glucocerebrosidase
MEFSSPSREECPKPLSRVSIMAGSLTGLLLLQAVSWASGARPCIPKSFGYSSVVCVCNATYCDSVDPLTLPALGTFSRYESTRSGRRMELSAGPIQANRTGTGLLLTLQPEQKFQKVKGFGGAMTDAAALNILALSPPAQNLLLKSYFSEEGIEYNIIRVPMASCDFSIRTYTYADTPDDFQLHNFSLPEEDTKWKIPLIHRALQLSQRPVSLFASPWTSPTWLKTNGAYNGKGSLKGQPGDIYHQTWARYFVKFLDAYAEHGLQFWAVTAENEPSAGLLSGYPFQCLGFTPEHQRDFIARDLGPTLANSTHHNVRLLILDDQRLLLPHWAKVVLTNPEAAKYVHGIAVHWYLDFLAPAKWTLGETHRLFPNTTLFASEACVGSKFWEQSVRLGSWDRGMQYSHSIITNLLYHVVGWTDWNLALNPEGGPNWVRNFVDSPIIVDITKDTFYKQPMFYHLGHFSKFIPEGSTRVGLVASQKNDLDAVALLHPDGSAVVVVLNRSSKDVPLTIKDPAVGFLETISPGYSIHTYLWRRQ

SEQ ID NO: 1079 - DNA, 1608 bp, synthetic construct
  misc_feature 1..1608: note = Variant of B-Glucocerebrosidase
  source 1..1608: mol_type = other DNA
atggagttttcttctcctagtagagaagaatgccccaagccactgagcagggtgagcatcatggctggatccctcacagggctgcttcttttgcaggcagtctcatgggcctctggagccaggccctgtattcccaagtcattcggctactcctcagtggtgtgtgtatgcaatgccacctattgtgacagtgtcgatcctctcactctccctgctctgggtaccttctcccggtatgagagcacaagaagtggaagacgcatggagctctcaatgggccctatacaggctccacgcactgggacaggtctgctgctgaccctccaacctgaacagaagtttcagaaagtcaagggatttggaggagccatgactgatgcagcagcactcaacatcttggccctgtctccaccagcccagaacctgctgttgaagtcctacttctcagaggaggggattgagtacaacatcatccgggttcccatggctagctgtgacttctccattaggacctatacatacgctgacacccccgatgattttcagctccataatttcagtctccctgaagaagacaccaaatggaagatacctctgattcacagagccttgcaactgtcccaaaggccagtgagcctcttcgcttctccctggactagtcctacatggctgaagactaatggtgcttacaatgggaagggctccctgaaaggacagccaggtgacatatatcatcagacatgggcccgctactttgtgaaattccttgatgcctatgcagagcacgggctccaattctgggcagtcaccgcagaaaacgagccctcagctgggctgctgtctggctacccctttcagtgcttgggctttactcctgagcatcaacgggacttcattgcccgggatttggggccaacactggccaacagcacccaccacaatgtaagactcctcattctggatgaccagaggctgctgctccctcattgggccaaggtggtgttgacaaacccagaagctgccaaatatgttcatggcatcgctgtccactggtacctggattttttggcccctgccaagtggactctgggagagacccacagactcttccccaataccacactgtttgcatcagaagcctgcgtggggagcaaattctgggagcagtctgttaggctgggttcctgggatcggggcatgcaatattcccatagtataataactaacctcctctaccacgtggtaggatggacagactggaatctggctttgaacccagaaggaggccccaattgggtgcgcaactttgttgacagccccatcattgtggatatcacaaaggacaccttctacaaacagcctatgttctatcatctggggcactttagcaagttcattccagagggttccactagagtaggcttggttgcctcacagaagaatgatctggatgctgtggcactcctgcatcctgacgggagtgcagtggtggtagtactgaacaggtctagcaaagatgttcccttgactatcaaagacccagctgtgggctttctggaaaccatttcccctggatactctatccacacctatctctggagaagacag

SEQ ID NO: 1080 - protein, 536 aa, synthetic construct
  REGION 1..536: note = Variant of B-Glucocerebrosidase
MEFSSPSREECPKPLSRVSIMAGSLTGLLLLQAVSWASGARPCIPKSFGYSSVVCVCNATYCDSVDPLTLPALGTFSRYESTRSGRRMELSMGPIQAPRTGTGLLLTLQPEQKFQKVKGFGGAMTDAAALNILALSPPAQNLLLKSYFSEEGIEYNIIRVPMASCDFSIRTYTYADTPDDFQLHNFSLPEEDTKWKIPLIHRALQLSQRPVSLFASPWTSPTWLKTNGAYNGKGSLKGQPGDIYHQTWARYFVKFLDAYAEHGLQFWAVTAENEPSAGLLSGYPFQCLGFTPEHQRDFIARDLGPTLANSTHHNVRLLILDDQRLLLPHWAKVVLTNPEAAKYVHGIAVHWYLDFLAPAKWTLGETHRLFPNTTLFASEACVGSKFWEQSVRLGSWDRGMQYSHSIITNLLYHVVGWTDWNLALNPEGGPNWVRNFVDSPIIVDITKDTFYKQPMFYHLGHFSKFIPEGSTRVGLVASQKNDLDAVALLHPDGSAVVVVLNRSSKDVPLTIKDPAVGFLETISPGYSIHTYLWRRQ

SEQ ID NO: 1081 - DNA, 1608 bp, synthetic construct
  misc_feature 1..1608: note = Variant of B-Glucocerebrosidase
  source 1..1608: mol_type = other DNA
atggagttttcttctcctagtagagaagaatgccccaagccactgagcagggtgagcatcatggctggatccctcacagggctgcttcttttgcaggcagtctcatgggcctctggagccaggccctgtattcccaagtcattcggctactcctcagtggtgtgtgtatgcaatgccacctattgtgacagtgtcgatcctctcactctccctgctctgggtaccttctcccggtatgagagcacaagaagtggaagacgcatggagctctcaatgggccctatacaggctaactggactgggacaggtctgctgctgaccctccaacctgaacagaagtttcagaaagtcaagggatttggaggagccatgactgatgcagcagcactcaacatcttggccctgtctccaccagcccagaacctgctgttgaagtcctacttctcagaggaggggattgagtacaacatcatccgggttcccatggctagctgtgacttctccattaggacctatacatacgctgacacccccgatgattttcagctccataatttcagtctccctgaagaagacaccaaatggaagatacctctgattcacagagccttgcaactgtcccaaaggccagtgagcctcttcgcttctccctggactagtcctacatggctgaagactaatggtgcttacaatgggaagggctccctgaaaggacagccaggtgacatatatcatcagacatgggcccgctactttgtgaaattccttgatgcctatgcagagcacgggctccaattctgggcagtcaccgcagaaaacgagccctcagctgggctgctgtctggctacccctttcagtgcttgggctttactcctgagcatcaacgggacttcattgcccgggatttggggccaacactggccaacagcacccaccacaatgtaagactcctcattctggatgaccagaggctgctgctccctcattgggccaaggtggtgttgacaaacccagaagctgccaaatatgttcatggcatcgctgtccactggtacctggattttttggcccctgccaagtggactctgggagagacccacagactcttccccaataccacactgtttgcatcagaagcctgcgtggggagcaaattctgggagcagtctgttaggctgggttcctgggatcggggcatgcaatattcccatagtataataactaacctcctctaccacgtggtaggatggacagactggaatctggctttgaacccagaaggaggccccaattgggtgcgcaactttgttgacagccccatcattgtggatatcacaaaggacaccttctacaaacagcctatgttctatcatctggggcactttagcaagttcattccagagggttccactagagtaggcttggttgcctcacagaagaatgatctggatgctgtggcactcctgcatcctgacgggagtgcagtggtggtagtactgaacaggtctagcaaagatgttcccttgactatcaaagacccagctgtgggctttctggaaaccatttcccctggatactctatccacacctatctctggagaagacag

SEQ ID NO: 1082 - protein, 536 aa, synthetic construct
  REGION 1..536: note = Variant of B-Glucocerebrosidase
MEFSSPSREECPKPLSRVSIMAGSLTGLLLLQAVSWASGARPCIPKSFGYSSVVCVCNATYCDSVDPLTLPALGTFSRYESTRSGRRMELSMGPIQANWTGTGLLLTLQPEQKFQKVKGFGGAMTDAAALNILALSPPAQNLLLKSYFSEEGIEYNIIRVPMASCDFSIRTYTYADTPDDFQLHNFSLPEEDTKWKIPLIHRALQLSQRPVSLFASPWTSPTWLKTNGAYNGKGSLKGQPGDIYHQTWARYFVKFLDAYAEHGLQFWAVTAENEPSAGLLSGYPFQCLGFTPEHQRDFIARDLGPTLANSTHHNVRLLILDDQRLLLPHWAKVVLTNPEAAKYVHGIAVHWYLDFLAPAKWTLGETHRLFPNTTLFASEACVGSKFWEQSVRLGSWDRGMQYSHSIITNLLYHVVGWTDWNLALNPEGGPNWVRNFVDSPIIVDITKDTFYKQPMFYHLGHFSKFIPEGSTRVGLVASQKNDLDAVALLHPDGSAVVVVLNRSSKDVPLTIKDPAVGFLETISPGYSIHTYLWRRQ

SEQ ID NO: 1083 - DNA, 1608 bp, synthetic construct
  misc_feature 1..1608: note = Variant of B-Glucocerebrosidase
  source 1..1608: mol_type = other DNA
atggagttttcttctcctagtagagaagaatgccccaagccactgagcagggtgagcatcatggctggatccctcacagggctgcttcttttgcaggcagtctcatgggcctctggagccaggccctgtattcccaagtcattcggctactcctcagtggtgtgtgtatgcaatgccacctattgtgacagtgtcgatcctctcactctccctgctctgggtaccttctcccggtatgagagcacaagaagtggaagacgcatggagctctcaggaggccctatacaggctaaccgcactgggacaggtctgctgctgaccctccaacctgaacagaagtttcagaaagtcaagggatttggaggagccatgactgatgcagcagcactcaacatcttggccctgtctccaccagcccagaacctgctgttgaagtcctacttctcagaggaggggattgagtacaacatcatccgggttcccatggctagctgtgacttctccattaggacctatacatacgctgacacccccgatgattttcagctccataatttcagtctccctgaagaagacaccaaatggaagatacctctgattcacagagccttgcaactgtcccaaaggccagtgagcctcttcgcttctccctggactagtcctacatggctgaagactaatggtgcttacaatgggaagggctccctgaaaggacagccaggtgacatatatcatcagacatgggcccgctactttgtgaaattccttgatgcctatgcagagcacgggctccaattctgggcagtcaccgcagaaaacgagccctcagctgggctgctgtctggctacccctttcagtgcttgggctttactcctgagcatcaacgggacttcattgcccgggatttggggccaacactggccaacagcacccaccacaatgtaagactcctcattctggatgaccagaggctgctgctccctcattgggccaaggtggtgttgacaaacccagaagctgccaaatatgttcatggcatcgctgtccactggtacctggattttttggcccctgccaagtggactctgggagagacccacagactcttccccaataccacactgtttgcatcagaagcctgcgtggggagcaaattctgggagcagtctgttaggctgggttcctgggatcggggcatgcaatattcccatagtataataactaacctcctctaccacgtggtaggatggacagactggaatctggctttgaacccagaaggaggccccaattgggtgcgcaactttgttgacagccccatcattgtggatatcacaaaggacaccttctacaaacagcctatgttctatcatctggggcactttagcaagttcattccagagggttccactagagtaggcttggttgcctcacagaagaatgatctggatgctgtggcactcctgcatcctgacgggagtgcagtggtggtagtactgaacaggtctagcaaagatgttcccttgactatcaaagacccagctgtgggctttctggaaaccatttcccctggatactctatccacacctatctctggagaagacag

SEQ ID NO: 1084 - protein, 536 aa, synthetic construct
  REGION 1..536: note = Variant of B-Glucocerebrosidase
MEFSSPSREECPKPLSRVSIMAGSLTGLLLLQAVSWASGARPCIPKSFGYSSVVCVCNATYCDSVDPLTLPALGTFSRYESTRSGRRMELSGGPIQANRTGTGLLLTLQPEQKFQKVKGFGGAMTDAAALNILALSPPAQNLLLKSYFSEEGIEYNIIRVPMASCDFSIRTYTYADTPDDFQLHNFSLPEEDTKWKIPLIHRALQLSQRPVSLFASPWTSPTWLKTNGAYNGKGSLKGQPGDIYHQTWARYFVKFLDAYAEHGLQFWAVTAENEPSAGLLSGYPFQCLGFTPEHQRDFIARDLGPTLANSTHHNVRLLILDDQRLLLPHWAKVVLTNPEAAKYVHGIAVHWYLDFLAPAKWTLGETHRLFPNTTLFASEACVGSKFWEQSVRLGSWDRGMQYSHSIITNLLYHVVGWTDWNLALNPEGGPNWVRNFVDSPIIVDITKDTFYKQPMFYHLGHFSKFIPEGSTRVGLVASQKNDLDAVALLHPDGSAVVVVLNRSSKDVPLTIKDPAVGFLETISPGYSIHTYLWRRQ

SEQ ID NO: 1085 - DNA, 1608 bp, synthetic construct
  misc_feature 1..1608: note = Variant of B-Glucocerebrosidase
  source 1..1608: mol_type = other DNA
atggagttttcttctcctagtagagaagaatgccccaagccactgagcagggtgagcatcatggctggatccctcacagggctgcttcttttgcaggcagtctcatgggcctctggagccaggccctgtattcccaagtcattcggctactcctcagtggtgtgtgtatgcaatgccacctattgtgacagtgtcgatcctctcactctccctgctctgggtaccttctcccggtatgagagcacaagaagtggaagacgcatggagctctcaatgggccctatacaggctaaccgcactgggacaggtctgctgctgaccctccaacctgaacagaagtaccagaaagtcaagggatttggaggagccatgactgatgcagcagcactcaacatcttggccctgtctccaccagcccagaacctgctgttgaagtcctacttctcagaggaggggattgagtacaacatcatccgggttcccatggctagctgtgacttctccattaggacctatacatacgctgacacccccgatgattttcagctccataatttcagtctccctgaagaagacaccaaatggaagatacctctgattcacagagccttgcaactgtcccaaaggccagtgagcctcttcgcttctccctggactagtcctacatggctgaagactaatggtgcttacaatgggaagggctccctgaaaggacagccaggtgacatatatcatcagacatgggcccgctactttgtgaaattccttgatgcctatgcagagcacgggctccaattctgggcagtcaccgcagaaaacgagccctcagctgggctgctgtctggctacccctttcagtgcttgggctttactcctgagcatcaacgggacttcattgcccgggatttggggccaacactggccaacagcacccaccacaatgtaagactcctcattctggatgaccagaggctgctgctccctcattgggccaaggtggtgttgacaaacccagaagctgccaaatatgttcatggcatcgctgtccactggtacctggattttttggcccctgccaagtggactctgggagagacccacagactcttccccaataccacactgtttgcatcagaagcctgcgtggggagcaaattctgggagcagtctgttaggctgggttcctgggatcggggcatgcaatattcccatagtataataactaacctcctctaccacgtggtaggatggacagactggaatctggctttgaacccagaaggaggccccaattgggtgcgcaactttgttgacagccccatcattgtggatatcacaaaggacaccttctacaaacagcctatgttctatcatctggggcactttagcaagttcattccagagggttccactagagtaggcttggttgcctcacagaagaatgatctggatgctgtggcactcctgcatcctgacgggagtgcagtggtggtagtactgaacaggtctagcaaagatgttcccttgactatcaaagacccagctgtgggctttctggaaaccatttcccctggatactctatccacacctatctctggagaagacag

SEQ ID NO: 1086 - protein, 536 aa, synthetic construct
  REGION 1..536: note = Variant of B-Glucocerebrosidase
MEFSSPSREECPKPLSRVSIMAGSLTGLLLLQAVSWASGARPCIPKSFGYSSVVCVCNATYCDSVDPLTLPALGTFSRYESTRSGRRMELSMGPIQANRTGTGLLLTLQPEQKYQKVKGFGGAMTDAAALNILALSPPAQNLLLKSYFSEEGIEYNIIRVPMASCDFSIRTYTYADTPDDFQLHNFSLPEEDTKWKIPLIHRALQLSQRPVSLFASPWTSPTWLKTNGAYNGKGSLKGQPGDIYHQTWARYFVKFLDAYAEHGLQFWAVTAENEPSAGLLSGYPFQCLGFTPEHQRDFIARDLGPTLANSTHHNVRLLILDDQRLLLPHWAKVVLTNPEAAKYVHGIAVHWYLDFLAPAKWTLGETHRLFPNTTLFASEACVGSKFWEQSVRLGSWDRGMQYSHSIITNLLYHVVGWTDWNLALNPEGGPNWVRNFVDSPIIVDITKDTFYKQPMFYHLGHFSKFIPEGSTRVGLVASQKNDLDAVALLHPDGSAVVVVLNRSSKDVPLTIKDPAVGFLETISPGYSIHTYLWRRQ

SEQ ID NO: 1087 - DNA, 1608 bp, synthetic construct
  misc_feature 1..1608: note = Variant of B-Glucocerebrosidase
  source 1..1608: mol_type = other DNA
atggagttttcttctcctagtagagaagaatgccccaagccactgagcagggtgagcatcatggctggatccctcacagggctgcttcttttgcaggcagtctcatgggcctctggagccaggccctgtattcccaagtcattcggctactcctcagtggtgtgtgtatgcaatgccacctattgtgacagtgtcgatcctctcactctccctgctctgggtaccttctcccggtatgagagcacaagaagtggaagacgcatggagctctcaatgggccctcaccaggctaaccgcactgggacaggtctgctgctgaccctccaacctgaacagaagtttcagaaagtcaagggatttggaggagccatgactgatgcagcagcactcaacatcttggccctgtctccaccagcccagaacctgctgttgaagtcctacttctcagaggaggggattgagtacaacatcatccgggttcccatggctagctgtgacttctccattaggacctatacatacgctgacacccccgatgattttcagctccataatttcagtctccctgaagaagacaccaaatggaagatacctctgattcacagagccttgcaactgtcccaaaggccagtgagcctcttcgcttctccctggactagtcctacatggctgaagactaatggtgcttacaatgggaagggctccctgaaaggacagccaggtgacatatatcatcagacatgggcccgctactttgtgaaattccttgatgcctatgcagagcacgggctccaattctgggcagtcaccgcagaaaacgagccctcagctgggctgctgtctggctacccctttcagtgcttgggctttactcctgagcatcaacgggacttcattgcccgggatttggggccaacactggccaacagcacccaccacaatgtaagactcctcattctggatgaccagaggctgctgctccctcattgggccaaggtggtgttgacaaacccagaagctgccaaatatgttcatggcatcgctgtccactggtacctggattttttggcccctgccaagtggactctgggagagacccacagactcttccccaataccacactgtttgcatcagaagcctgcgtggggagcaaattctgggagcagtctgttaggctgggttcctgggatcggggcatgcaatattcccatagtataataactaacctcctctaccacgtggtaggatggacagactggaatctggctttgaacccagaaggaggccccaattgggtgcgcaactttgttgacagccccatcattgtggatatcacaaaggacaccttctacaaacagcctatgttctatcatctggggcactttagcaagttcattccagagggttccactagagtaggcttggttgcctcacagaagaatgatctggatgctgtggcactcctgcatcctgacgggagtgcagtggtggtagtactgaacaggtctagcaaagatgttcccttgactatcaaagacccagctgtgggctttctggaaaccatttcccctggatactctatccacacctatctctggagaagacag

SEQ ID NO: 1088 - protein, 536 aa, synthetic construct
  REGION 1..536: note = Variant of B-Glucocerebrosidase
MEFSSPSREECPKPLSRVSIMAGSLTGLLLLQAVSWASGARPCIPKSFGYSSVVCVCNATYCDSVDPLTLPALGTFSRYESTRSGRRMELSMGPHQANRTGTGLLLTLQPEQKFQKVKGFGGAMTDAAALNILALSPPAQNLLLKSYFSEEGIEYNIIRVPMASCDFSIRTYTYADTPDDFQLHNFSLPEEDTKWKIPLIHRALQLSQRPVSLFASPWTSPTWLKTNGAYNGKGSLKGQPGDIYHQTWARYFVKFLDAYAEHGLQFWAVTAENEPSAGLLSGYPFQCLGFTPEHQRDFIARDLGPTLANSTHHNVRLLILDDQRLLLPHWAKVVLTNPEAAKYVHGIAVHWYLDFLAPAKWTLGETHRLFPNTTLFASEACVGSKFWEQSVRLGSWDRGMQYSHSIITNLLYHVVGWTDWNLALNPEGGPNWVRNFVDSPIIVDITKDTFYKQPMFYHLGHFSKFIPEGSTRVGLVASQKNDLDAVALLHPDGSAVVVVLNRSSKDVPLTIKDPAVGFLETISPGYSIHTYLWRRQ

SEQ ID NO: 1089 - DNA, 1608 bp, synthetic construct
  misc_feature 1..1608: note = Variant of B-Glucocerebrosidase
  source 1..1608: mol_type = other DNA
atggagttttcttctcctagtagagaagaatgccccaagccactgagcagggtgagcatcatggctggatccctcacagggctgcttcttttgcaggcagtctcatgggcctctggagccaggccctgtattcccaagtcattcggctactcctcagtggtgtgtgtatgcaatgccacctattgtgacagtgtcgatcctctcactctccctgctctgggtaccttctcccggtatgagagcacaagaagtggaagacgcatggagctctcaatgggccctatacaggctaaccgcactggggcaggtctgctgctgaccctccaacctgaacagaagtttcagaaagtcaagggatttggaggagccatgactgatgcagcagcactcaacatcttggccctgtctccaccagcccagaacctgctgttgaagtcctacttctcagaggaggggattgagtacaacatcatccgggttcccatggctagctgtgacttctccattaggacctatacatacgctgacacccccgatgattttcagctccataatttcagtctccctgaagaagacaccaaatggaagatacctctgattcacagagccttgcaactgtcccaaaggccagtgagcctcttcgcttctccctggactagtcctacatggctgaagactaatggtgcttacaatgggaagggctccctgaaaggacagccaggtgacatatatcatcagacatgggcccgctactttgtgaaattccttgatgcctatgcagagcacgggctccaattctgggcagtcaccgcagaaaacgagccctcagctgggctgctgtctggctacccctttcagtgcttgggctttactcctgagcatcaacgggacttcattgcccgggatttggggccaacactggccaacagcacccaccacaatgtaagactcctcattctggatgaccagaggctgctgctccctcattgggccaaggtggtgttgacaaacccagaagctgccaaatatgttcatggcatcgctgtccactggtacctggattttttggcccctgccaagtggactctgggagagacccacagactcttccccaataccacactgtttgcatcagaagcctgcgtggggagcaaattctgggagcagtctgttaggctgggttcctgggatcggggcatgcaatattcccatagtataataactaacctcctctaccacgtggtaggatggacagactggaatctggctttgaacccagaaggaggccccaattgggtgcgcaactttgttgacagccccatcattgtggatatcacaaaggacaccttctacaaacagcctatgttctatcatctggggcactttagcaagttcattccagagggttccactagagtaggcttggttgcctcacagaagaatgatctggatgctgtggcactcctgcatcctgacgggagtgcagtggtggtagtactgaacaggtctagcaaagatgttcccttgactatcaaagacccagctgtgggctttctggaaaccatttcccctggatactctatccacacctatctctggagaagacag

SEQ ID NO: 1090 - protein, 536 aa, synthetic construct
  REGION 1..536: note = Variant of B-Glucocerebrosidase
MEFSSPSREECPKPLSRVSIMAGSLTGLLLLQAVSWASGARPCIPKSFGYSSVVCVCNATYCDSVDPLTLPALGTFSRYESTRSGRRMELSMGPIQANRTGAGLLLTLQPEQKFQKVKGFGGAMTDAAALNILALSPPAQNLLLKSYFSEEGIEYNIIRVPMASCDFSIRTYTYADTPDDFQLHNFSLPEEDTKWKIPLIHRALQLSQRPVSLFASPWTSPTWLKTNGAYNGKGSLKGQPGDIYHQTWARYFVKFLDAYAEHGLQFWAVTAENEPSAGLLSGYPFQCLGFTPEHQRDFIARDLGPTLANSTHHNVRLLILDDQRLLLPHWAKVVLTNPEAAKYVHGIAVHWYLDFLAPAKWTLGETHRLFPNTTLFASEACVGSKFWEQSVRLGSWDRGMQYSHSIITNLLYHVVGWTDWNLALNPEGGPNWVRNFVDSPIIVDITKDTFYKQPMFYHLGHFSKFIPEGSTRVGLVASQKNDLDAVALLHPDGSAVVVVLNRSSKDVPLTIKDPAVGFLETISPGYSIHTYLWRRQ

SEQ ID NO: 1091 - DNA, 1608 bp, synthetic construct
  misc_feature 1..1608: note = Variant of B-Glucocerebrosidase
  source 1..1608: mol_type = other DNA
atggagttttcttctcctagtagagaagaatgccccaagccactgagcagggtgagcatcatggctggatccctcacagggctgcttcttttgcaggcagtctcatgggcctctggagccaggccctgtattcccaagtcattcggctactcctcagtggtgtgtgtatgcaatgccacctattgtgacagtgtcgatcctctcactctccctgctctgggtaccttctcccggtatgagagcacaagaagtggaagacgcatggagctctcaaagggccctatacaggctaaccgcactgggacaggtctgctgctgaccctccaacctgaacagaagtttcagaaagtcaagggatttggaggagccatgactgatgcagcagcactcaacatcttggccctgtctccaccagcccagaacctgctgttgaagtcctacttctcagaggaggggattgagtacaacatcatccgggttcccatggctagctgtgacttctccattaggacctatacatacgctgacacccccgatgattttcagctccataatttcagtctccctgaagaagacaccaaatggaagatacctctgattcacagagccttgcaactgtcccaaaggccagtgagcctcttcgcttctccctggactagtcctacatggctgaagactaatggtgcttacaatgggaagggctccctgaaaggacagccaggtgacatatatcatcagacatgggcccgctactttgtgaaattccttgatgcctatgcagagcacgggctccaattctgggcagtcaccgcagaaaacgagccctcagctgggctgctgtctggctacccctttcagtgcttgggctttactcctgagcatcaacgggacttcattgcccgggatttggggccaacactggccaacagcacccaccacaatgtaagactcctcattctggatgaccagaggctgctgctccctcattgggccaaggtggtgttgacaaacccagaagctgccaaatatgttcatggcatcgctgtccactggtacctggattttttggcccctgccaagtggactctgggagagacccacagactcttccccaataccacactgtttgcatcagaagcctgcgtggggagcaaattctgggagcagtctgttaggctgggttcctgggatcggggcatgcaatattcccatagtataataactaacctcctctaccacgtggtaggatggacagactggaatctggctttgaacccagaaggaggccccaattgggtgcgcaactttgttgacagccccatcattgtggatatcacaaaggacaccttctacaaacagcctatgttctatcatctggggcactttagcaagttcattccagagggttccactagagtaggcttggttgcctcacagaagaatgatctggatgctgtggcactcctgcatcctgacgggagtgcagtggtggtagtactgaacaggtctagcaaagatgttcccttgactatcaaagacccagctgtgggctttctggaaaccatttcccctggatactctatccacacctatctctggagaagacag

SEQ ID NO: 1092 - protein, 536 aa, synthetic construct
  REGION 1..536: note = Variant of B-Glucocerebrosidase
MEFSSPSREECPKPLSRVSIMAGSLTGLLLLQAVSWASGARPCIPKSFGYSSVVCVCNATYCDSVDPLTLPALGTFSRYESTRSGRRMELSKGPIQANRTGTGLLLTLQPEQKFQKVKGFGGAMTDAAALNILALSPPAQNLLLKSYFSEEGIEYNIIRVPMASCDFSIRTYTYADTPDDFQLHNFSLPEEDTKWKIPLIHRALQLSQRPVSLFASPWTSPTWLKTNGAYNGKGSLKGQPGDIYHQTWARYFVKFLDAYAEHGLQFWAVTAENEPSAGLLSGYPFQCLGFTPEHQRDFIARDLGPTLANSTHHNVRLLILDDQRLLLPHWAKVVLTNPEAAKYVHGIAVHWYLDFLAPAKWTLGETHRLFPNTTLFASEACVGSKFWEQSVRLGSWDRGMQYSHSIITNLLYHVVGWTDWNLALNPEGGPNWVRNFVDSPIIVDITKDTFYKQPMFYHLGHFSKFIPEGSTRVGLVASQKNDLDAVALLHPDGSAVVVVLNRSSKDVPLTIKDPAVGFLETISPGYSIHTYLWRRQ

SEQ ID NO: 1093 - DNA, 1608 bp, synthetic construct
  misc_feature 1..1608: note = Variant of B-Glucocerebrosidase
  source 1..1608: mol_type = other DNA
atggagttttcttctcctagtagagaagaatgccccaagccactgagcagggtgagcatcatggctggatccctcacagggctgcttcttttgcaggcagtctcatgggcctctggagccaggccctgtattcccaagtcattcggctactcctcagtggtgtgtgtatgcaatgccacctattgtgacagtgtcgatcctctcactctccctgctctgggtaccttctcccggtatgagagcacaagaagtggaagacgcatggagctctcaatgggccctatagatgctaaccgcactgggacaggtctgctgctgaccctccaacctgaacagaagtttcagaaagtcaagggatttggaggagccatgactgatgcagcagcactcaacatcttggccctgtctccaccagcccagaacctgctgttgaagtcctacttctcagaggaggggattgagtacaacatcatccgggttcccatggctagctgtgacttctccattaggacctatacatacgctgacacccccgatgattttcagctccataatttcagtctccctgaagaagacaccaaatggaagatacctctgattcacagagccttgcaactgtcccaaaggccagtgagcctcttcgcttctccctggactagtcctacatggctgaagactaatggtgcttacaatgggaagggctccctgaaaggacagccaggtgacatatatcatcagacatgggcccgctactttgtgaaattccttgatgcctatgcagagcacgggctccaattctgggcagtcaccgcagaaaacgagccctcagctgggctgctgtctggctacccctttcagtgcttgggctttactcctgagcatcaacgggacttcattgcccgggatttggggccaacactggccaacagcacccaccacaatgtaagactcctcattctggatgaccagaggctgctgctccctcattgggccaaggtggtgttgacaaacccagaagctgccaaatatgttcatggcatcgctgtccactggtacctggattttttggcccctgccaagtggactctgggagagacccacagactcttccccaataccacactgtttgcatcagaagcctgcgtggggagcaaattctgggagcagtctgttaggctgggttcctgggatcggggcatgcaatattcccatagtataataactaacctcctctaccacgtggtaggatggacagactggaatctggctttgaacccagaaggaggccccaattgggtgcgcaactttgttgacagccccatcattgtggatatcacaaaggacaccttctacaaacagcctatgttctatcatctggggcactttagcaagttcattccagagggttccactagagtaggcttggttgcctcacagaagaatgatctggatgctgtggcactcctgcatcctgacgggagtgcagtggtggtagtactgaacaggtctagcaaagatgttcccttgactatcaaagacccagctgtgggctttctggaaaccatttcccctggatactctatccacacctatctctggagaagacag

SEQ ID NO: 1094 - protein, 536 aa, synthetic construct
  REGION 1..536: note = Variant of B-Glucocerebrosidase
MEFSSPSREECPKPLSRVSIMAGSLTGLLLLQAVSWASGARPCIPKSFGYSSVVCVCNATYCDSVDPLTLPALGTFSRYESTRSGRRMELSMGPIDANRTGTGLLLTLQPEQKFQKVKGFGGAMTDAAALNILALSPPAQNLLLKSYFSEEGIEYNIIRVPMASCDFSIRTYTYADTPDDFQLHNFSLPEEDTKWKIPLIHRALQLSQRPVSLFASPWTSPTWLKTNGAYNGKGSLKGQPGDIYHQTWARYFVKFLDAYAEHGLQFWAVTAENEPSAGLLSGYPFQCLGFTPEHQRDFIARDLGPTLANSTHHNVRLLILDDQRLLLPHWAKVVLTNPEAAKYVHGIAVHWYLDFLAPAKWTLGETHRLFPNTTLFASEACVGSKFWEQSVRLGSWDRGMQYSHSIITNLLYHVVGWTDWNLALNPEGGPNWVRNFVDSPIIVDITKDTFYKQPMFYHLGHFSKFIPEGSTRVGLVASQKNDLDAVALLHPDGSAVVVVLNRSSKDVPLTIKDPAVGFLETISPGYSIHTYLWRRQ

SEQ ID NO: 1095 - DNA, 1608 bp, synthetic construct
  misc_feature 1..1608: note = Variant of B-Glucocerebrosidase
  source 1..1608: mol_type = other DNA
atggagttttcttctcctagtagagaagaatgccccaagccactgagcagggtgagcatcatggctggatccctcacagggctgcttcttttgcaggcagtctcatgggcctctggagccaggccctgtattcccaagtcattcggctactcctcagtggtgtgtgtatgcaatgccacctattgtgacagtgtcgatcctctcactctccctgctctgggtaccttctcccggtatgagagcacaagaagtggaagacgcatggagctctcaatgggcgagatacaggctaaccgcactgggacaggtctgctgctgaccctccaacctgaacagaagtttcagaaagtcaagggatttggaggagccatgactgatgcagcagcactcaacatcttggccctgtctccaccagcccagaacctgctgttgaagtcctacttctcagaggaggggattgagtacaacatcatccgggttcccatggctagctgtgacttctccattaggacctatacatacgctgacacccccgatgattttcagctccataatttcagtctccctgaagaagacaccaaatggaagatacctctgattcacagagccttgcaactgtcccaaaggccagtgagcctcttcgcttctccctggactagtcctacatggctgaagactaatggtgcttacaatgggaagggctccctgaaaggacagccaggtgacatatatcatcagacatgggcccgctactttgtgaaattccttgatgcctatgcagagcacgggctccaattctgggcagtcaccgcagaaaacgagccctcagctgggctgctgtctggctacccctttcagtgcttgggctttactcctgagcatcaacgggacttcattgcccgggatttggggccaacactggccaacagcacccaccacaatgtaagactcctcattctggatgaccagaggctgctgctccctcattgggccaaggtggtgttgacaaacccagaagctgccaaatatgttcatggcatcgctgtccactggtacctggattttttggcccctgccaagtggactctgggagagacccacagactcttccccaataccacactgtttgcatcagaagcctgcgtggggagcaaattctgggagcagtctgttaggctgggttcctgggatcggggcatgcaatattcccatagtataataactaacctcctctaccacgtggtaggatggacagactggaatctggctttgaacccagaaggaggccccaattgggtgcgcaactttgttgacagccccatcattgtggatatcacaaaggacaccttctacaaacagcctatgttctatcatctggggcactttagcaagttcattccagagggttccactagagtaggcttggttgcctcacagaagaatgatctggatgctgtggcactcctgcatcctgacgggagtgcagtggtggtagtactgaacaggtctagcaaagatgttcccttgactatcaaagacccagctgtgggctttctggaaaccatttcccctggatactctatccacacctatctctggagaagacag

SEQ ID NO: 1096 - protein, 536 aa, synthetic construct
  REGION 1..536: note = Variant of B-Glucocerebrosidase
MEFSSPSREECPKPLSRVSIMAGSLTGLLLLQAVSWASGARPCIPKSFGYSSVVCVCNATYCDSVDPLTLPALGTFSRYESTRSGRRMELSMGEIQANRTGTGLLLTLQPEQKFQKVKGFGGAMTDAAALNILALSPPAQNLLLKSYFSEEGIEYNIIRVPMASCDFSIRTYTYADTPDDFQLHNFSLPEEDTKWKIPLIHRALQLSQRPVSLFASPWTSPTWLKTNGAYNGKGSLKGQPGDIYHQTWARYFVKFLDAYAEHGLQFWAVTAENEPSAGLLSGYPFQCLGFTPEHQRDFIARDLGPTLANSTHHNVRLLILDDQRLLLPHWAKVVLTNPEAAKYVHGIAVHWYLDFLAPAKWTLGETHRLFPNTTLFASEACVGSKFWEQSVRLGSWDRGMQYSHSIITNLLYHVVGWTDWNLALNPEGGPNWVRNFVDSPIIVDITKDTFYKQPMFYHLGHFSKFIPEGSTRVGLVASQKNDLDAVALLHPDGSAVVVVLNRSSKDVPLTIKDPAVGFLETISPGYSIHTYLWRRQ

SEQ ID NO: 1097 - DNA, 1608 bp, synthetic construct
  misc_feature 1..1608: note = Variant of B-Glucocerebrosidase
  source 1..1608: mol_type = other DNA
atggagttttcttctcctagtagagaagaatgccccaagccactgagcagggtgagcatcatggctggatccctcacagggctgcttcttttgcaggcagtctcatgggcctctggagccaggccctgtattcccaagtcattcggctactcctcagtggtgtgtgtatgcaatgccacctattgtgacagtgtcgatcctctcactctccctgctctgggtaccttctcccggtatgagagcacaagaagtggaagacgcatggagctctcaatgggccctatagaggctaaccgcactgggacaggtctgctgctgaccctccaacctgaacagaagtttcagaaagtcaagggatttggaggagccatgactgatgcagcagcactcaacatcttggccctgtctccaccagcccagaacctgctgttgaagtcctacttctcagaggaggggattgagtacaacatcatccgggttcccatggctagctgtgacttctccattaggacctatacatacgctgacacccccgatgattttcagctccataatttcagtctccctgaagaagacaccaaatggaagatacctctgattcacagagccttgcaactgtcccaaaggccagtgagcctcttcgcttctccctggactagtcctacatggctgaagactaatggtgcttacaatgggaagggctccctgaaaggacagccaggtgacatatatcatcagacatgggcccgctactttgtgaaattccttgatgcctatgcagagcacgggctccaattctgggcagtcaccgcagaaaacgagccctcagctgggctgctgtctggctacccctttcagtgcttgggctttactcctgagcatcaacgggacttcattgcccgggatttggggccaacactggccaacagcacccaccacaatgtaagactcctcattctggatgaccagaggctgctgctccctcattgggccaaggtggtgttgacaaacccagaagctgccaaatatgttcatggcatcgctgtccactggtacctggattttttggcccctgccaagtggactctgggagagacccacagactcttccccaataccacactgtttgcatcagaagcctgcgtggggagcaaattctgggagcagtctgttaggctgggttcctgggatcggggcatgcaatattcccatagtataataactaacctcctctaccacgtggtaggatggacagactggaatctggctttgaacccagaaggaggccccaattgggtgcgcaactttgttgacagccccatcattgtggatatcacaaaggacaccttctacaaacagcctatgttctatcatctggggcactttagcaagttcattccagagggttccactagagtaggcttggttgcctcacagaagaatgatctggatgctgtggcactcctgcatcctgacgggagtgcagtggtggtagtactgaacaggtctagcaaagatgttcccttgactatcaaagacccagctgtgggctttctggaaaccatttcccctggatactctatccacacctatctctggagaagacag

SEQ ID NO: 1098 - protein, 536 aa, synthetic construct
  REGION 1..536: note = Variant of B-Glucocerebrosidase
MEFSSPSREECPKPLSRVSIMAGSLTGLLLLQAVSWASGARPCIPKSFGYSSVVCVCNATYCDSVDPLTLPALGTFSRYESTRSGRRMELSMGPIEANRTGTGLLLTLQPEQKFQKVKGFGGAMTDAAALNILALSPPAQNLLLKSYFSEEGIEYNIIRVPMASCDFSIRTYTYADTPDDFQLHNFSLPEEDTKWKIPLIHRALQLSQRPVSLFASPWTSPTWLKTNGAYNGKGSLKGQPGDIYHQTWARYFVKFLDAYAEHGLQFWAVTAENEPSAGLLSGYPFQCLGFTPEHQRDFIARDLGPTLANSTHHNVRLLILDDQRLLLPHWAKVVLTNPEAAKYVHGIAVHWYLDFLAPAKWTLGETHRLFPNTTLFASEACVGSKFWEQSVRLGSWDRGMQYSHSIITNLLYHVVGWTDWNLALNPEGGPNWVRNFVDSPIIVDITKDTFYKQPMFYHLGHFSKFIPEGSTRVGLVASQKNDLDAVALLHPDGSAVVVVLNRSSKDVPLTIKDPAVGFLETISPGYSIHTYLWRRQ

SEQ ID NO: 1099 - DNA, 1608 bp, synthetic construct
  misc_feature 1..1608: note = Variant of B-Glucocerebrosidase
  source 1..1608: mol_type = other DNA
atggagttttcttctcctagtagagaagaatgccccaagccactgagcagggtgagcatcatggctggatccctcacagggctgcttcttttgcaggcagtctcatgggcctctggagccaggccctgtattcccaagtcattcggctactcctcagtggtgtgtgtatgcaatgccacctattgtgacagtgtcgatcctctcactctccctgctctgggtaccttctcccggtatgagagcacaagaagtggaagacgcatggagctctcaatgggcccttggcaggctaaccgcactgggacaggtctgctgctgaccctccaacctgaacagaagtttcagaaagtcaagggatttggaggagccatgactgatgcagcagcactcaacatcttggccctgtctccaccagcccagaacctgctgttgaagtcctacttctcagaggaggggattgagtacaacatcatccgggttcccatggctagctgtgacttctccattaggacctatacatacgctgacacccccgatgattttcagctccataatttcagtctccctgaagaagacaccaaatggaagatacctctgattcacagagccttgcaactgtcccaaaggccagtgagcctcttcgcttctccctggactagtcctacatggctgaagactaatggtgcttacaatgggaagggctccctgaaaggacagccaggtgacatatatcatcagacatgggcccgctactttgtgaaattccttgatgcctatgcagagcacgggctccaattctgggcagtcaccgcagaaaacgagccctcagctgggctgctgtctggctacccctttcagtgcttgggctttactcctgagcatcaacgggacttcattgcccgggatttggggccaacactggccaacagcacccaccacaatgtaagactcctcattctggatgaccagaggctgctgctccctcattgggccaaggtggtgttgacaaacccagaagctgccaaatatgttcatggcatcgctgtccactggtacctggattttttggcccctgccaagtggactctgggagagacccacagactcttccccaataccacactgtttgcatcagaagcctgcgtggggagcaaattctgggagcagtctgttaggctgggttcctgggatcggggcatgcaatattcccatagtataataactaacctcctctaccacgtggtaggatggacagactggaatctggctttgaacccagaaggaggccccaattgggtgcgcaactttgttgacagccccatcattgtggatatcacaaaggacaccttctacaaacagcctatgttctatcatctggggcactttagcaagttcattccagagggttccactagagtaggcttggttgcctcacagaagaatgatctggatgctgtggcactcctgcatcctgacgggagtgcagtggtggtagtactgaacaggtctagcaaagatgttcccttgactatcaaagacccagctgtgggctttctggaaaccatttcccctggatactctatccacacctatctctggagaagacag

SEQ ID NO: 1100 - protein, 536 aa, synthetic construct
  REGION 1..536: note = Variant of B-Glucocerebrosidase
MEFSSPSREECPKPLSRVSIMAGSLTGLLLLQAVSWASGARPCIPKSFGYSSVVCVCNATYCDSVDPLTLPALGTFSRYESTRSGRRMELSMGPWQANRTGTGLLLTLQPEQKFQKVKGFGGAMTDAAALNILALSPPAQNLLLKSYFSEEGIEYNIIRVPMASCDFSIRTYTYADTPDDFQLHNFSLPEEDTKWKIPLIHRALQLSQRPVSLFASPWTSPTWLKTNGAYNGKGSLKGQPGDIYHQTWARYFVKFLDAYAEHGLQFWAVTAENEPSAGLLSGYPFQCLGFTPEHQRDFIARDLGPTLANSTHHNVRLLILDDQRLLLPHWAKVVLTNPEAAKYVHGIAVHWYLDFLAPAKWTLGETHRLFPNTTLFASEACVGSKFWEQSVRLGSWDRGMQYSHSIITNLLYHVVGWTDWNLALNPEGGPNWVRNFVDSPIIVDITKDTFYKQPMFYHLGHFSKFIPEGSTRVGLVASQKNDLDAVALLHPDGSAVVVVLNRSSKDVPLTIKDPAVGFLETISPGYSIHTYLWRRQ

SEQ ID NO: 1101 - DNA, 1608 bp, synthetic construct
  misc_feature 1..1608: note = Variant of B-Glucocerebrosidase
  source 1..1608: mol_type = other DNA
atggagttttcttctcctagtagagaagaatgccccaagccactgagcagggtgagcatcatggctggatccctcacagggctgcttcttttgcaggcagtctcatgggcctctggagccaggccctgtattcccaagtcattcggctactcctcagtggtgtgtgtatgcaatgccacctattgtgacagtgtcgatcctctcactctccctgctctgggtaccttctcccggtatgagagcacaagaagtggaagacgcatggagctctcaatgggccctatacaggctaaccgcactgggacaggtctgatactgaccctccaacctgaacagaagtttcagaaagtcaagggatttggaggagccatgactgatgcagcagcactcaacatcttggccctgtctccaccagcccagaacctgctgttgaagtcctacttctcagaggaggggattgagtacaacatcatccgggttcccatggctagctgtgacttctccattaggacctatacatacgctgacacccccgatgattttcagctccataatttcagtctccctgaagaagacaccaaatggaagatacctctgattcacagagccttgcaactgtcccaaaggccagtgagcctcttcgcttctccctggactagtcctacatggctgaagactaatggtgcttacaatgggaagggctccctgaaaggacagccaggtgacatatatcatcagacatgggcccgctactttgtgaaattccttgatgcctatgcagagcacgggctccaattctgggcagtcaccgcagaaaacgagccctcagctgggctgctgtctggctacccctttcagtgcttgggctttactcctgagcatcaacgggacttcattgcccgggatttggggccaacactggccaacagcacccaccacaatgtaagactcctcattctggatgaccagaggctgctgctccctcattgggccaaggtggtgttgacaaacccagaagctgccaaatatgttcatggcatcgctgtccactggtacctggattttttggcccctgccaagtggactctgggagagacccacagactcttccccaataccacactgtttgcatcagaagcctgcgtggggagcaaattctgggagcagtctgttaggctgggttcctgggatcggggcatgcaatattcccatagtataataactaacctcctctaccacgtggtaggatggacagactggaatctggctttgaacccagaaggaggccccaattgggtgcgcaactttgttgacagccccatcattgtggatatcacaaaggacaccttctacaaacagcctatgttctatcatctggggcactttagcaagttcattccagagggttccactagagtaggcttggttgcctcacagaagaatgatctggatgctgtggcactcctgcatcctgacgggagtgcagtggtggtagtactgaacaggtctagcaaagatgttcccttgactatcaaagacccagctgtgggctttctggaaaccatttcccctggatactctatccacacctatctctggagaagacag

SEQ ID NO: 1102 - protein, 536 aa, synthetic construct
  REGION 1..536: note = Variant of B-Glucocerebrosidase
MEFSSPSREECPKPLSRVSIMAGSLTGLLLLQAVSWASGARPCIPKSFGYSSVVCVCNATYCDSVDPLTLPALGTFSRYESTRSGRRMELSMGPIQANRTGTGLILTLQPEQKFQKVKGFGGAMTDAAALNILALSPPAQNLLLKSYFSEEGIEYNIIRVPMASCDFSIRTYTYADTPDDFQLHNFSLPEEDTKWKIPLIHRALQLSQRPVSLFASPWTSPTWLKTNGAYNGKGSLKGQPGDIYHQTWARYFVKFLDAYAEHGLQFWAVTAENEPSAGLLSGYPFQCLGFTPEHQRDFIARDLGPTLANSTHHNVRLLILDDQRLLLPHWAKVVLTNPEAAKYVHGIAVHWYLDFLAPAKWTLGETHRLFPNTTLFASEACVGSKFWEQSVRLGSWDRGMQYSHSIITNLLYHVVGWTDWNLALNPEGGPNWVRNFVDSPIIVDITKDTFYKQPMFYHLGHFSKFIPEGSTRVGLVASQKNDLDAVALLHPDGSAVVVVLNRSSKDVPLTIKDPAVGFLETISPGYSIHTYLWRRQ

SEQ ID NO: 1103 - DNA, 1608 bp, synthetic construct
  misc_feature 1..1608: note = Variant of B-Glucocerebrosidase
  source 1..1608: mol_type = other DNA
atggagttttcttctcctagtagagaagaatgccccaagccactgagcagggtgagcatcatggctggatccctcacagggctgcttcttttgcaggcagtctcatgggcctctggagccaggccctgtattcccaagtcattcggctactcctcagtggtgtgtgtatgcaatgccacctattgtgacagtgtcgatcctctcactctccctgctctgggtaccttctcccggtatgagagcacaagaagtggaagacgcatggagctctcaatgggccctatacaggctaaccgcactgggacaggtctgctgctgaccctccaacctgaacagcagtttcagaaagtcaagggatttggaggagccatgactgatgcagcagcactcaacatcttggccctgtctccaccagcccagaacctgctgttgaagtcctacttctcagaggaggggattgagtacaacatcatccgggttcccatggctagctgtgacttctccattaggacctatacatacgctgacacccccgatgattttcagctccataatttcagtctccctgaagaagacaccaaatggaagatacctctgattcacagagccttgcaactgtcccaaaggccagtgagcctcttcgcttctccctggactagtcctacatggctgaagactaatggtgcttacaatgggaagggctccctgaaaggacagccaggtgacatatatcatcagacatgggcccgctactttgtgaaattccttgatgcctatgcagagcacgggctccaattctgggcagtcaccgcagaaaacgagccctcagctgggctgctgtctggctacccctttcagtgcttgggctttactcctgagcatcaacgggacttcattgcccgggatttggggccaacactggccaacagcacccaccacaatgtaagactcctcattctggatgaccagaggctgctgctccctcattgggccaaggtggtgttgacaaacccagaagctgccaaatatgttcatggcatcgctgtccactggtacctggattttttggcccctgccaagtggactctgggagagacccacagactcttccccaataccacactgtttgcatcagaagcctgcgtggggagcaaattctgggagcagtctgttaggctgggttcctgggatcggggcatgcaatattcccatagtataataactaacctcctctaccacgtggtaggatggacagactggaatctggctttgaacccagaaggaggccccaattgggtgcgcaactttgttgacagccccatcattgtggatatcacaaaggacaccttctacaaacagcctatgttctatcatctggggcactttagcaagttcattccagagggttccactagagtaggcttggttgcctcacagaagaatgatctggatgctgtggcactcctgcatcctgacgggagtgcagtggtggtagtactgaacaggtctagcaaagatgttcccttgactatcaaagacccagctgtgggctttctggaaaccatttcccctggatactctatccacacctatctctggagaagacag

SEQ ID NO: 1104 - protein, 536 aa, synthetic construct
  REGION 1..536: note = Variant of B-Glucocerebrosidase
MEFSSPSREECPKPLSRVSIMAGSLTGLLLLQAVSWASGARPCIPKSFGYSSVVCVCNATYCDSVDPLTLPALGTFSRYESTRSGRRMELSMGPIQANRTGTGLLLTLQPEQQFQKVKGFGGAMTDAAALNILALSPPAQNLLLKSYFSEEGIEYNIIRVPMASCDFSIRTYTYADTPDDFQLHNFSLPEEDTKWKIPLIHRALQLSQRPVSLFASPWTSPTWLKTNGAYNGKGSLKGQPGDIYHQTWARYFVKFLDAYAEHGLQFWAVTAENEPSAGLLSGYPFQCLGFTPEHQRDFIARDLGPTLANSTHHNVRLLILDDQRLLLPHWAKVVLTNPEAAKYVHGIAVHWYLDFLAPAKWTLGETHRLFPNTTLFASEACVGSKFWEQSVRLGSWDRGMQYSHSIITNLLYHVVGWTDWNLALNPEGGPNWVRNFVDSPIIVDITKDTFYKQPMFYHLGHFSKFIPEGSTRVGLVASQKNDLDAVALLHPDGSAVVVVLNRSSKDVPLTIKDPAVGFLETISPGYSIHTYLWRRQ

SEQ ID NO: 1105 - DNA, 1608 bp, synthetic construct
  misc_feature 1..1608: note = Variant of B-Glucocerebrosidase
  source 1..1608: mol_type = other DNA
atggagttttcttctcctagtagagaagaatgccccaagccactgagcagggtgagcatcatggctggatccctcacagggctgcttcttttgcaggcagtctcatgggcctctggagccaggccctgtattcccaagtcattcggctactcctcagtggtgtgtgtatgcaatgccacctattgtgacagtgtcgatcctctcactctccctgctctgggtaccttctcccggtatgagagcacaagaagtggaagacgcatggagctctcacacggccctatacaggctaaccgcactgggacaggtctgctgctgaccctccaacctgaacagaagtttcagaaagtcaagggatttggaggagccatgactgatgcagcagcactcaacatcttggccctgtctccaccagcccagaacctgctgttgaagtcctacttctcagaggaggggattgagtacaacatcatccgggttcccatggctagctgtgacttctccattaggacctatacatacgctgacacccccgatgattttcagctccataatttcagtctccctgaagaagacaccaaatggaagatacctctgattcacagagccttgcaactgtcccaaaggccagtgagcctcttcgcttctccctggactagtcctacatggctgaagactaatggtgcttacaatgggaagggctccctgaaaggacagccaggtgacatatatcatcagacatgggcccgctactttgtgaaattccttgatgcctatgcagagcacgggctccaattctgggcagtcaccgcagaaaacgagccctcagctgggctgctgtctggctacccctttcagtgcttgggctttactcctgagcatcaacgggacttcattgcccgggatttggggccaacactggccaacagcacccaccacaatgtaagactcctcattctggatgaccagaggctgctgctccctcattgggccaaggtggtgttgacaaacccagaagctgccaaatatgttcatggcatcgctgtccactggtacctggattttttggcccctgccaagtggactctgggagagacccacagactcttccccaataccacactgtttgcatcagaagcctgcgtggggagcaaattctgggagcagtctgttaggctgggttcctgggatcggggcatgcaatattcccatagtataataactaacctcctctaccacgtggtaggatggacagactggaatctggctttgaacccagaaggaggccccaattgggtgcgcaactttgttgacagccccatcattgtggatatcacaaaggacaccttctacaaacagcctatgttctatcatctggggcactttagcaagttcattccagagggttccactagagtaggcttggttgcctcacagaagaatgatctggatgctgtggcactcctgcatcctgacgggagtgcagtggtggtagtactgaacaggtctagcaaagatgttcccttgactatcaaagacccagctgtgggctttctggaaaccatttcccctggatactctatccacacctatctctggagaagacag

SEQ ID NO: 1106 - protein, 536 aa, synthetic construct
  REGION 1..536: note = Variant of B-Glucocerebrosidase
MEFSSPSREECPKPLSRVSIMAGSLTGLLLLQAVSWASGARPCIPKSFGYSSVVCVCNATYCDSVDPLTLPALGTFSRYESTRSGRRMELSHGPIQANRTGTGLLLTLQPEQKFQKVKGFGGAMTDAAALNILALSPPAQNLLLKSYFSEEGIEYNIIRVPMASCDFSIRTYTYADTPDDFQLHNFSLPEEDTKWKIPLIHRALQLSQRPVSLFASPWTSPTWLKTNGAYNGKGSLKGQPGDIYHQTWARYFVKFLDAYAEHGLQFWAVTAENEPSAGLLSGYPFQCLGFTPEHQRDFIARDLGPTLANSTHHNVRLLILDDQRLLLPHWAKVVLTNPEAAKYVHGIAVHWYLDFLAPAKWTLGETHRLFPNTTLFASEACVGSKFWEQSVRLGSWDRGMQYSHSIITNLLYHVVGWTDWNLALNPEGGPNWVRNFVDSPIIVDITKDTFYKQPMFYHLGHFSKFIPEGSTRVGLVASQKNDLDAVALLHPDGSAVVVVLNRSSKDVPLTIKDPAVGFLETISPGYSIHTYLWRRQ

SEQ ID NO: 1107 - DNA, 1608 bp, synthetic construct
  misc_feature 1..1608: note = Variant of B-Glucocerebrosidase
  source 1..1608: mol_type = other DNA
atggagttttcttctcctagtagagaagaatgccccaagccactgagcagggtgagcatcatggctggatccctcacagggctgcttcttttgcaggcagtctcatgggcctctggagccaggccctgtattcccaagtcattcggctactcctcagtggtgtgtgtatgcaatgccacctattgtgacagtgtcgatcctctcactctccctgctctgggtaccttctcccggtatgagagcacaagaagtggaagacgcatggagctctcacaaggccctatacaggctaaccgcactgggacaggtctgctgctgaccctccaacctgaacagaagtttcagaaagtcaagggatttggaggagccatgactgatgcagcagcactcaacatcttggccctgtctccaccagcccagaacctgctgttgaagtcctacttctcagaggaggggattgagtacaacatcatccgggttcccatggctagctgtgacttctccattaggacctatacatacgctgacacccccgatgattttcagctccataatttcagtctccctgaagaagacaccaaatggaagatacctctgattcacagagccttgcaactgtcccaaaggccagtgagcctcttcgcttctccctggactagtcctacatggctgaagactaatggtgcttacaatgggaagggctccctgaaaggacagccaggtgacatatatcatcagacatgggcccgctactttgtgaaattccttgatgcctatgcagagcacgggctccaattctgggcagtcaccgcagaaaacgagccctcagctgggctgctgtctggctacccctttcagtgcttgggctttactcctgagcatcaacgggacttcattgcccgggatttggggccaacactggccaacagcacccaccacaatgtaagactcctcattctggatgaccagaggctgctgctccctcattgggccaaggtggtgttgacaaacccagaagctgccaaatatgttcatggcatcgctgtccactggtacctggattttttggcccctgccaagtggactctgggagagacccacagactcttccccaataccacactgtttgcatcagaagcctgcgtggggagcaaattctgggagcagtctgttaggctgggttcctgggatcggggcatgcaatattcccatagtataataactaacctcctctaccacgtggtaggatggacagactggaatctggctttgaacccagaaggaggccccaattgggtgcgcaactttgttgacagccccatcattgtggatatcacaaaggacaccttctacaaacagcctatgttctatcatctggggcactttagcaagttcattccagagggttccactagagtaggcttggttgcctcacagaagaatgatctggatgctgtggcactcctgcatcctgacgggagtgcagtggtggtagtactgaacaggtctagcaaagatgttcccttgactatcaaagacccagctgtgggctttctggaaaccatttcccctggatactctatccacacctatctctggagaagacag

SEQ ID NO: 1108 - protein, 536 aa, synthetic construct
  REGION 1..536: note = Variant of B-Glucocerebrosidase
MEFSSPSREECPKPLSRVSIMAGSLTGLLLLQAVSWASGARPCIPKSFGYSSVVCVCNATYCDSVDPLTLPALGTFSRYESTRSGRRMELSQGPIQANRTGTGLLLTLQPEQKFQKVKGFGGAMTDAAALNILALSPPAQNLLLKSYFSEEGIEYNIIRVPMASCDFSIRTYTYADTPDDFQLHNFSLPEEDTKWKIPLIHRALQLSQRPVSLFASPWTSPTWLKTNGAYNGKGSLKGQPGDIYHQTWARYFVKFLDAYAEHGLQFWAVTAENEPSAGLLSGYPFQCLGFTPEHQRDFIARDLGPTLANSTHHNVRLLILDDQRLLLPHWAKVVLTNPEAAKYVHGIAVHWYLDFLAPAKWTLGETHRLFPNTTLFASEACVGSKFWEQSVRLGSWDRGMQYSHSIITNLLYHVVGWTDWNLALNPEGGPNWVRNFVDSPIIVDITKDTFYKQPMFYHLGHFSKFIPEGSTRVGLVASQKNDLDAVALLHPDGSAVVVVLNRSSKDVPLTIKDPAVGFLETISPGYSIHTYLWRRQ

SEQ ID NO: 1109 - DNA, 1608 bp, synthetic construct
  misc_feature 1..1608: note = Variant of B-Glucocerebrosidase
  source 1..1608: mol_type = other DNA
atggagttttcttctcctagtagagaagaatgccccaagccactgagcagggtgagcatcatggctggatccctcacagggctgcttcttttgcaggcagtctcatgggcctctggagccaggccctgtattcccaagtcattcggctactcctcagtggtgtgtgtatgcaatgccacctattgtgacagtgtcgatcctctcactctccctgctctgggtaccttctcccggtatgagagcacaagaagtggaagacgcatggagctctcagaaggccctatacaggctaaccgcactgggacaggtctgctgctgaccctccaacctgaacagaagtttcagaaagtcaagggatttggaggagccatgactgatgcagcagcactcaacatcttggccctgtctccaccagcccagaacctgctgttgaagtcctacttctcagaggaggggattgagtacaacatcatccgggttcccatggctagctgtgacttctccattaggacctatacatacgctgacacccccgatgattttcagctccataatttcagtctccctgaagaagacaccaaatggaagatacctctgattcacagagccttgcaactgtcccaaaggccagtgagcctcttcgcttctccctggactagtcctacatggctgaagactaatggtgcttacaatgggaagggctccctgaaaggacagccaggtgacatatatcatcagacatgggcccgctactttgtgaaattccttgatgcctatgcagagcacgggctccaattctgggcagtcaccgcagaaaacgagccctcagctgggctgctgtctggctacccctttcagtgcttgggctttactcctgagcatcaacgggacttcattgcccgggatttggggccaacactggccaacagcacccaccacaatgtaagactcctcattctggatgaccagaggctgctgctccctcattgggccaaggtggtgttgacaaacccagaagctgccaaatatgttcatggcatcgctgtccactggtacctggattttttggcccctgccaagtggactctgggagagacccacagactcttccccaataccacactgtttgcatcagaagcctgcgtggggagcaaattctgggagcagtctgttaggctgggttcctgggatcggggcatgcaatattcccatagtataataactaacctcctctaccacgtggtaggatggacagactggaatctggctttgaacccagaaggaggccccaattgggtgcgcaactttgttgacagccccatcattgtggatatcacaaaggacaccttctacaaacagcctatgttctatcatctggggcactttagcaagttcattccagagggttccactagagtaggcttggttgcctcacagaagaatgatctggatgctgtggcactcctgcatcctgacgggagtgcagtggtggtagtactgaacaggtctagcaaagatgttcccttgactatcaaagacccagctgtgggctttctggaaaccatttcccctggatactctatccacacctatctctggagaagacag

SEQ ID NO: 1110 - protein, 536 aa, synthetic construct
  REGION 1..536: note = Variant of B-Glucocerebrosidase
MEFSSPSREECPKPLSRVSIMAGSLTGLLLLQAVSWASGARPCIPKSFGYSSVVCVCNATYCDSVDPLTLPALGTFSRYESTRSGRRMELSEGPIQANRTGTGLLLTLQPEQKFQKVKGFGGAMTDAAALNILALSPPAQNLLLKSYFSEEGIEYNIIRVPMASCDFSIRTYTYADTPDDFQLHNFSLPEEDTKWKIPLIHRALQLSQRPVSLFASPWTSPTWLKTNGAYNGKGSLKGQPGDIYHQTWARYFVKFLDAYAEHGLQFWAVTAENEPSAGLLSGYPFQCLGFTPEHQRDFIARDLGPTLANSTHHNVRLLILDDQRLLLPHWAKVVLTNPEAAKYVHGIAVHWYLDFLAPAKWTLGETHRLFPNTTLFASEACVGSKFWEQSVRLGSWDRGMQYSHSIITNLLYHVVGWTDWNLALNPEGGPNWVRNFVDSPIIVDITKDTFYKQPMFYHLGHFSKFIPEGSTRVGLVASQKNDLDAVALLHPDGSAVVVVLNRSSKDVPLTIKDPAVGFLETISPGYSIHTYLWRRQ

SEQ ID NO: 1111 - DNA, 1608 bp, synthetic construct
  misc_feature 1..1608: note = Variant of B-Glucocerebrosidase
  source 1..1608: mol_type = other DNA
atggagttttcttctcctagtagagaagaatgccccaagccactgagcagggtgagcatcatggctggatccctcacagggctgcttcttttgcaggcagtctcatgggcctctggagccaggccctgtattcccaagtcattcggctactcctcagtggtgtgtgtatgcaatgccacctattgtgacagtgtcgatcctctcactctccctgctctgggtaccttctcccggtatgagagcacaagaagtggaagacgcatggagctctcaatgggccctatacaggctaaccgcactgggacaggtctgctgctgaccctccaacctgaacagaagtttcagaaagtcaagggatttggaggagccatgactgatgcagcagcactcaacatcttggccctgtctccaccagcccagaacctgctgttgaagtcctacttctcagaggaggggattgagtacaacatcatccgggttcccatggctagctgtgacttctccattaggacctatacatacgctgacacccccgatgattttcagctccataatttcagtctccctgaagaagacaccaaatggaagatacctctgattcacagagccttgcaactgtcccaaaggccagtgagcctcttcgcttctccctggactagtcctacatggctgaagactaatggtgcttacaatgggaagggctccctgaaaggacagccaggtgacatatatcatcagacatgggcccgctactttgtgaaattccttgatgcctatgcagagcacgggctccaattctgggcagtcaccgcagaaaacgagccctcagctgggctgctgtctggctacccctttcagtgcttgggctttactcctgagcatcaacgggacttcattgcccgggatttggggccaacactggccaacagcacccaccacaatgtaagactcctcattctggatgaccagagggttctgctccctcattgggccaaggtggtgttgacaaacccagaagctgccaaatatgttcatggcatcgctgtccactggtacctggattttttggcccctgccaagtggactctgggagagacccacagactcttccccaataccacactgtttgcatcagaagcctgcgtggggagcaaattctgggagcagtctgttaggctgggttcctgggatcggggcatgcaatattcccatagtataataactaacctcctctaccacgtggtaggatggacagactggaatctggctttgaacccagaaggaggccccaattgggtgcgcaactttgttgacagccccatcattgtggatatcacaaaggacaccttctacaaacagcctatgttctatcatctggggcactttagcaagttcattccagagggttccactagagtaggcttggttgcctcacagaagaatgatctggatgctgtggcactcctgcatcctgacgggagtgcagtggtggtagtactgaacaggtctagcaaagatgttcccttgactatcaaagacccagctgtgggctttctggaaaccatttcccctggatactctatccacacctatctctggagaagacag

SEQ ID NO: 1112 - protein, 536 aa, synthetic construct
  REGION 1..536: note = Variant of B-Glucocerebrosidase
MEFSSPSREECPKPLSRVSIMAGSLTGLLLLQAVSWASGARPCIPKSFGYSSVVCVCNATYCDSVDPLTLPALGTFSRYESTRSGRRMELSMGPIQANRTGTGLLLTLQPEQKFQKVKGFGGAMTDAAALNILALSPPAQNLLLKSYFSEEGIEYNIIRVPMASCDFSIRTYTYADTPDDFQLHNFSLPEEDTKWKIPLIHRALQLSQRPVSLFASPWTSPTWLKTNGAYNGKGSLKGQPGDIYHQTWARYFVKFLDAYAEHGLQFWAVTAENEPSAGLLSGYPFQCLGFTPEHQRDFIARDLGPTLANSTHHNVRLLILDDQRVLLPHWAKVVLTNPEAAKYVHGIAVHWYLDFLAPAKWTLGETHRLFPNTTLFASEACVGSKFWEQSVRLGSWDRGMQYSHSIITNLLYHVVGWTDWNLALNPEGGPNWVRNFVDSPIIVDITKDTFYKQPMFYHLGHFSKFIPEGSTRVGLVASQKNDLDAVALLHPDGSAVVVVLNRSSKDVPLTIKDPAVGFLETISPGYSIHTYLWRRQ

SEQ ID NO: 1113 - DNA, 1608 bp, synthetic construct
  misc_feature 1..1608: note = Variant of B-Glucocerebrosidase
  source 1..1608: mol_type = other DNA
atggagttttcttctcctagtagagaagaatgccccaagccactgagcagggtgagcatcatggctggatccctcacagggctgcttcttttgcaggcagtctcatgggcctctggagccaggccctgtattcccaagtcattcggctactcctcagtggtgtgtgtatgcaatgccacctattgtgacagtgtcgatcctctcactctccctgctctgggtaccttctcccggtatgagagcacaagaagtggaagacgcatggagctctcaatgggccctatacaggctaaccgcactgggacaggtctgctgctgaccctccaacctgaacagaagtttcagaaagtcaagggatttggaggagccatgactgatgcagcagcactcaacatcttggccctgtctccaccagcccagaacctgctgttgaagtcctacttctcagaggaggggattgagtacaacatcatccgggttcccatggctagctgtgacttctccattaggacctatacatacgctgacacccccgatgattttcagctccataatttcagtctccctgaagaagacaccaaatggaagatacctctgattcacagagccttgcaactgtcccaaaggccagtgagcctcttcgcttctccctggactagtcctacatggctgaagactaatggtgcttacaatgggaagggctccctgaaaggacagccaggtgacatatatcatcagacatgggcccgctactttgtgaaattccttgatgcctatgcagagcacgggctccaattctgggcagtcaccgcagaaaacgagccctcagctgggctgctgtctggctacccctttcagtgcttgggctttactcctgagcatcaacgggacttcattgcccgggatttggggccaacactggccaacagcacccaccacaatgtaagactcctcattctggatgaccagaggctgctgctccctcattgggccaaggtggtgttggagaacccagaagctgccaaatatgttcatggcatcgctgtccactggtacctggattttttggcccctgccaagtggactctgggagagacccacagactcttccccaataccacactgtttgcatcagaagcctgcgtggggagcaaattctgggagcagtctgttaggctgggttcctgggatcggggcatgcaatattcccatagtataataactaacctcctctaccacgtggtaggatggacagactggaatctggctttgaacccagaaggaggccccaattgggtgcgcaactttgttgacagccccatcattgtggatatcacaaaggacaccttctacaaacagcctatgttctatcatctggggcactttagcaagttcattccagagggttccactagagtaggcttggttgcctcacagaagaatgatctggatgctgtggcactcctgcatcctgacgggagtgcagtggtggtagtactgaacaggtctagcaaagatgttcccttgactatcaaagacccagctgtgggctttctggaaaccatttcccctggatactctatccacacctatctctggagaagacag

SEQ ID NO: 1114 - protein, 536 aa, synthetic construct
  REGION 1..536: note = Variant of B-Glucocerebrosidase
MEFSSPSREECPKPLSRVSIMAGSLTGLLLLQAVSWASGARPCIPKSFGYSSVVCVCNATYCDSVDPLTLPALGTFSRYESTRSGRRMELSMGPIQANRTGTGLLLTLQPEQKFQKVKGFGGAMTDAAALNILALSPPAQNLLLKSYFSEEGIEYNIIRVPMASCDFSIRTYTYADTPDDFQLHNFSLPEEDTKWKIPLIHRALQLSQRPVSLFASPWTSPTWLKTNGAYNGKGSLKGQPGDIYHQTWARYFVKFLDAYAEHGLQFWAVTAENEPSAGLLSGYPFQCLGFTPEHQRDFIARDLGPTLANSTHHNVRLLILDDQRLLLPHWAKVVLENPEAAKYVHGIAVHWYLDFLAPAKWTLGETHRLFPNTTLFASEACVGSKFWEQSVRLGSWDRGMQYSHSIITNLLYHVVGWTDWNLALNPEGGPNWVRNFVDSPIIVDITKDTFYKQPMFYHLGHFSKFIPEGSTRVGLVASQKNDLDAVALLHPDGSAVVVVLNRSSKDVPLTIKDPAVGFLETISPGYSIHTYLWRRQ

SEQ ID NO: 1115 - DNA, 1608 bp, synthetic construct
  misc_feature 1..1608: note = Variant of B-Glucocerebrosidase
  source 1..1608: mol_type = other DNA
atggagttttcttctcctagtagagaagaatgccccaagccactgagcagggtgagcatcatggctggatccctcacagggctgcttcttttgcaggcagtctcatgggcctctggagccaggccctgtattcccaagtcattcggctactcctcagtggtgtgtgtatgcaatgccacctattgtgacagtgtcgatcctctcactctccctgctctgggtaccttctcccggtatgagagcacaagaagtggaagacgcatggagctctcaatgggccctatacaggctaaccgcactgggacaggtctgctgctgaccctccaacctgaacagaagtttcagaaagtcaagggatttggaggagccatgactgatgcagcagcactcaacatcttggccctgtctccaccagcccagaacctgctgttgaagtcctacttctcagaggaggggattgagtacaacatcatccgggttcccatggctagctgtgacttctccattaggacctatacatacgctgacacccccgatgattttcagctccataatttcagtctccctgaagaagacaccaaatggaagatacctctgattcacagagccttgcaactgtcccaaaggccagtgagcctcttcgcttctccctggactagtcctacatggctgaagactaatggtgcttacaatgggaagggctccctgaaaggacagccaggtgacatatatcatcagacatgggcccgctactttgtgaaattccttgatgcctatgcagagcacgggctccaattctgggcagtcaccgcagaaaacgagccctcagctgggctgctgtctggctacccctttcagtgcttgggctttactcctgagcatcaacgggacttcattgcccgggatttggggccaacactggccaacagcacccaccacaatgtaagactcctcattctggatgaccagaggctgctgctccctcattgggccaaggtggtgttgacaaacccagaagctgccaaatatgttcatggcatcgctgtccactggtacctggattttttggcccctgccaagtggactctgggagagacccacagactcttccccaataccacactgtttgcatcagaagcctgcgtggggagccagttctgggagcagtctgttaggctgggttcctgggatcggggcatgcaatattcccatagtataataactaacctcctctaccacgtggtaggatggacagactggaatctggctttgaacccagaaggaggccccaattgggtgcgcaactttgttgacagccccatcattgtggatatcacaaaggacaccttctacaaacagcctatgttctatcatctggggcactttagcaagttcattccagagggttccactagagtaggcttggttgcctcacagaagaatgatctggatgctgtggcactcctgcatcctgacgggagtgcagtggtggtagtactgaacaggtctagcaaagatgttcccttgactatcaaagacccagctgtgggctttctggaaaccatttcccctggatactctatccacacctatctctggagaagacag

SEQ ID NO: 1116 - protein, 536 aa, synthetic construct
  REGION 1..536: note = Variant of B-Glucocerebrosidase
MEFSSPSREECPKPLSRVSIMAGSLTGLLLLQAVSWASGARPCIPKSFGYSSVVCVCNATYCDSVDPLTLPALGTFSRYESTRSGRRMELSMGPIQANRTGTGLLLTLQPEQKFQKVKGFGGAMTDAAALNILALSPPAQNLLLKSYFSEEGIEYNIIRVPMASCDFSIRTYTYADTPDDFQLHNFSLPEEDTKWKIPLIHRALQLSQRPVSLFASPWTSPTWLKTNGAYNGKGSLKGQPGDIYHQTWARYFVKFLDAYAEHGLQFWAVTAENEPSAGLLSGYPFQCLGFTPEHQRDFIARDLGPTLANSTHHNVRLLILDDQRLLLPHWAKVVLTNPEAAKYVHGIAVHWYLDFLAPAKWTLGETHRLFPNTTLFASEACVGSQFWEQSVRLGSWDRGMQYSHSIITNLLYHVVGWTDWNLALNPEGGPNWVRNFVDSPIIVDITKDTFYKQPMFYHLGHFSKFIPEGSTRVGLVASQKNDLDAVALLHPDGSAVVVVLNRSSKDVPLTIKDPAVGFLETISPGYSIHTYLWRRQ

SEQ ID NO: 1117 - DNA, 1608 bp, synthetic construct
  misc_feature 1..1608: note = Variant of B-Glucocerebrosidase
  source 1..1608: mol_type = other DNA
atggagttttcttctcctagtagagaagaatgccccaagccactgagcagggtgagcatcatggctggatccctcacagggctgcttcttttgcaggcagtctcatgggcctctggagccaggccctgtattcccaagtcattcggctactcctcagtggtgtgtgtatgcaatgccacctattgtgacagtgtcgatcctctcactctccctgctctgggtaccttctcccggtatgagagcacaagaagtggaagacgcatggagctctcaatgggccctatacaggctaaccgcactgggacaggtctgctgctgaccctccaacctgaacagaagtttcagaaagtcaagggatttggaggagccatgactgatgcagcagcactcaacatcttggccctgtctccaccagcccagaacctgctgttgaagtcctacttctcagaggaggggattgagtacaacatcatccgggttcccatggctagctgtgacttctccattaggacctatacatacgctgacacccccgatgattttcagctccataatttcagtctccctgaagaagacaccaaatggaagatacctctgattcacagagccttgcaactgtcccaaaggccagtgagcctcttcgcttctccctggactagtcctacatggctgaagactaatggtgcttacaatgggaagggctccctgaaaggacagccaggtgacatatatcatcagacatgggcccgctactttgtgaaattccttgatgcctatgcagagcaggggctccaattctgggcagtcaccgcagaaaacgagccctcagctgggctgctgtctggctacccctttcagtgcttgggctttactcctgagcatcaacgggacttcattgcccgggatttggggccaacactggccaacagcacccaccacaatgtaagactcctcattctggatgaccagaggctgctgctccctcattgggccaaggtggtgttgacaaacccagaagctgccaaatatgttcatggcatcgctgtccactggtacctggattttttggcccctgccaagtggactctgggagagacccacagactcttccccaataccacactgtttgcatcagaagcctgcgtggggagcaaattctgggagcagtctgttaggctgggttcctgggatcggggcatgcaatattcccatagtataataactaacctcctctaccacgtggtaggatggacagactggaatctggctttgaacccagaaggaggccccaattgggtgcgcaactttgttgacagccccatcattgtggatatcacaaaggacaccttctacaaacagcctatgttctatcatctggggcactttagcaagttcattccagagggttccactagagtaggcttggttgcctcacagaagaatgatctggatgctgtggcactcctgcatcctgacgggagtgcagtggtggtagtactgaacaggtctagcaaagatgttcccttgactatcaaagacccagctgtgggctttctggaaaccatttcccctggatactctatccacacctatctctggagaagacag

SEQ ID NO: 1118 - protein, 536 aa, synthetic construct
  REGION 1..536: note = Variant of B-Glucocerebrosidase
MEFSSPSREECPKPLSRVSIMAGSLTGLLLLQAVSWASGARPCIPKSFGYSSVVCVCNATYCDSVDPLTLPALGTFSRYESTRSGRRMELSMGPIQANRTGTGLLLTLQPEQKFQKVKGFGGAMTDAAALNILALSPPAQNLLLKSYFSEEGIEYNIIRVPMASCDFSIRTYTYADTPDDFQLHNFSLPEEDTKWKIPLIHRALQLSQRPVSLFASPWTSPTWLKTNGAYNGKGSLKGQPGDIYHQTWARYFVKFLDAYAEQGLQFWAVTAENEPSAGLLSGYPFQCLGFTPEHQRDFIARDLGPTLANSTHHNVRLLILDDQRLLLPHWAKVVLTNPEAAKYVHGIAVHWYLDFLAPAKWTLGETHRLFPNTTLFASEACVGSKFWEQSVRLGSWDRGMQYSHSIITNLLYHVVGWTDWNLALNPEGGPNWVRNFVDSPIIVDITKDTFYKQPMFYHLGHFSKFIPEGSTRVGLVASQKNDLDAVALLHPDGSAVVVVLNRSSKDVPLTIKDPAVGFLETISPGYSIHTYLWRRQ

SEQ ID NO: 1119 - DNA, 1608 bp, synthetic construct
  misc_feature 1..1608: note = Variant of B-Glucocerebrosidase
  source 1..1608: mol_type = other DNA
atggagttttcttctcctagtagagaagaatgccccaagccactgagcagggtgagcatcatggctggatccctcacagggctgcttcttttgcaggcagtctcatgggcctctggagccaggccctgtattcccaagtcattcggctactcctcagtggtgtgtgtatgcaatgccacctattgtgacagtgtcgatcctctcactctccctgctctgggtaccttctcccggtatgagagcacaagaagtggaagacgcatggagctctcaatgggccctatacaggctaaccgcactgggacaggtctgctgctgaccctccaacctgaacagaagtttcagaaagtcaagggatttggaggagccatgactgatgcagcagcactcaacatcttggccctgtctccaccagcccagaacctgctgttgaagtcctacttctcagaggaggggattgagtacaacatcatccgggttcccatggctagctgtgacttctccattaggacctatacatacgctgacacccccgatgattttcagctccataatttcagtctccctgaagaagacaccaaatggaagatacctctgattcacagagccttgcaactgtcccaaaggccagtgagcctcttcgcttctccctggactagtcctacatggctgaagactaatggtgcttacaatgggaagggctccctgaaaggacagccaggtgacatatatcatcagacatgggcccgctactttgtgaaattccttgatgcctatgcagagcacgggctccaattctgggcagtcaccgcagaaaacgagccctcagctgggctgctgtctggctacccctttcagtgcttgggctttactcctgagcatcaacgggacttcattgcccgggatttggggccaacactggccaacagcacccaccacaatgtaagactcctcattctggatgaccagaggctgctgctccctcattgggccaaggtggtgttgacaaacccagaagctgccaaatatgttcatggcatcgctgtccactggtacctggattttttggcccctgccaagtggactctgggagagacccacagactcttccccaataccacactgtttgcatcagaagcctgcgtggggagcaaaatctgggagcagtctgttaggctgggttcctgggatcggggcatgcaatattcccatagtataataactaacctcctctaccacgtggtaggatggacagactggaatctggctttgaacccagaaggaggccccaattgggtgcgcaactttgttgacagccccatcattgtggatatcacaaaggacaccttctacaaacagcctatgttctatcatctggggcactttagcaagttcattccagagggttccactagagtaggcttggttgcctcacagaagaatgatctggatgctgtggcactcctgcatcctgacgggagtgcagtggtggtagtactgaacaggtctagcaaagatgttcccttgactatcaaagacccagctgtgggctttctggaaaccatttcccctggatactctatccacacctatctctggagaagacag

SEQ ID NO: 1120 - protein, 536 aa, synthetic construct
  REGION 1..536: note = Variant of B-Glucocerebrosidase
MEFSSPSREECPKPLSRVSIMAGSLTGLLLLQAVSWASGARPCIPKSFGYSSVVCVCNATYCDSVDPLTLPALGTFSRYESTRSGRRMELSMGPIQANRTGTGLLLTLQPEQKFQKVKGFGGAMTDAAALNILALSPPAQNLLLKSYFSEEGIEYNIIRVPMASCDFSIRTYTYADTPDDFQLHNFSLPEEDTKWKIPLIHRALQLSQRPVSLFASPWTSPTWLKTNGAYNGKGSLKGQPGDIYHQTWARYFVKFLDAYAEHGLQFWAVTAENEPSAGLLSGYPFQCLGFTPEHQRDFIARDLGPTLANSTHHNVRLLILDDQRLLLPHWAKVVLTNPEAAKYVHGIAVHWYLDFLAPAKWTLGETHRLFPNTTLFASEACVGSKIWEQSVRLGSWDRGMQYSHSIITNLLYHVVGWTDWNLALNPEGGPNWVRNFVDSPIIVDITKDTFYKQPMFYHLGHFSKFIPEGSTRVGLVASQKNDLDAVALLHPDGSAVVVVLNRSSKDVPLTIKDPAVGFLETISPGYSIHTYLWRRQ

SEQ ID NO: 1121 - DNA, 1608 bp, synthetic construct
  misc_feature 1..1608: note = Variant of B-Glucocerebrosidase
  source 1..1608: mol_type = other DNA
atggagttttcttctcctagtagagaagaatgccccaagccactgagcagggtgagcatcatggctggatccctcacagggctgcttcttttgcaggcagtctcatgggcctctggagccaggccctgtattcccaagtcattcggctactcctcagtggtgtgtgtatgcaatgccacctattgtgacagtgtcgatcctctcactctccctgctctgggtaccttctcccggtatgagagcacaagaagtggaagacgcatggagctctcaatgggccctatacaggctaaccgcactgggacaggtctgctgctgaccctccaacctgaacagaagtttcagaaagtcaagggatttggaggagccatgactgatgcagcagcactcaacatcttggccctgtctccaccagcccagaacctgctgttgaagtcctacttctcagaggaggggattgagtacaacatcatccgggttcccatggctagctgtgacttctccattaggacctatacatacgctgacacccccgatgattttcagctccataatttcagtctccctgaagaagacaccaaatggaagatacctctgattcacagagccttgcaactgtcccaaaggccagtgagcctcttcgcttctccctggactagtcctacatggctgaagactaatggtgcttacaatgggaagggctccctgaaaggacagccaggtgacatatatcatcagacatgggcccgctactttgtgaaattccttgatgcctatgcagagcacgggctccaattctgggcagtcaccgcagaaaacgagccctcagctgggctgctgtctggctacccctttcagtgcttgggctttactcctgagcatcaacgggacttcattgcccgggatttggggccaacactggccaacagcacccaccacaatgtaagactcctcattctggatgaccagaggctgctgctccctcattgggccaaggtggtgttgacaaacccagaagctgccaaatatgttcatggcatcgctgtccactggtacctggattttttggcccctgccgaatggactctgggagagacccacagactcttccccaataccacactgtttgcatcagaagcctgcgtggggagcaaattctgggagcagtctgttaggctgggttcctgggatcggggcatgcaatattcccatagtataataactaacctcctctaccacgtggtaggatggacagactggaatctggctttgaacccagaaggaggccccaattgggtgcgcaactttgttgacagccccatcattgtggatatcacaaaggacaccttctacaaacagcctatgttctatcatctggggcactttagcaagttcattccagagggttccactagagtaggcttggttgcctcacagaagaatgatctggatgctgtggcactcctgcatcctgacgggagtgcagtggtggtagtactgaacaggtctagcaaagatgttcccttgactatcaaagacccagctgtgggctttctggaaaccatttcccctggatactctatccacacctatctctggagaagacag

SEQ ID NO: 1122 - protein, 536 aa, synthetic construct
  REGION 1..536: note = Variant of B-Glucocerebrosidase
MEFSSPSREECPKPLSRVSIMAGSLTGLLLLQAVSWASGARPCIPKSFGYSSVVCVCNATYCDSVDPLTLPALGTFSRYESTRSGRRMELSMGPIQANRTGTGLLLTLQPEQKFQKVKGFGGAMTDAAALNILALSPPAQNLLLKSYFSEEGIEYNIIRVPMASCDFSIRTYTYADTPDDFQLHNFSLPEEDTKWKIPLIHRALQLSQRPVSLFASPWTSPTWLKTNGAYNGKGSLKGQPGDIYHQTWARYFVKFLDAYAEHGLQFWAVTAENEPSAGLLSGYPFQCLGFTPEHQRDFIARDLGPTLANSTHHNVRLLILDDQRLLLPHWAKVVLTNPEAAKYVHGIAVHWYLDFLAPAEWTLGETHRLFPNTTLFASEACVGSKFWEQSVRLGSWDRGMQYSHSIITNLLYHVVGWTDWNLALNPEGGPNWVRNFVDSPIIVDITKDTFYKQPMFYHLGHFSKFIPEGSTRVGLVASQKNDLDAVALLHPDGSAVVVVLNRSSKDVPLTIKDPAVGFLETISPGYSIHTYLWRRQ

SEQ ID NO: 1123 - DNA, 1608 bp, synthetic construct
  misc_feature 1..1608: note = Variant of B-Glucocerebrosidase
  source 1..1608: mol_type = other DNA
atggagttttcttctcctagtagagaagaatgccccaagccactgagcagggtgagcatcatggctggatccctcacagggctgcttcttttgcaggcagtctcatgggcctctggagccaggccctgtattcccaagtcattcggctactcctcagtggtgtgtgtatgcaatgccacctattgtgacagtgtcgatcctctcactctccctgctctgggtaccttctcccggtatgagagcacaagaagtggaagacgcatggagctctcaatgggccctatacaggctaaccgcactgggacaggtctgctgctgaccctccaacctgaacagaagtttcagaaagtcaagggatttggaggagccatgactgatgcagcagcactcaacatcttggccctgtctccaccagcccagaacctgctgttgaagtcctacttctcagaggaggggattgagtacaacatcatccgggttcccatggctagctgtgacttctccattaggacctatacatacgctgacacccccgatgattttcagctccataatttcagtctccctgaagaagacaccaaatggaagatacctctgattcacagagccttgcaactgtcccaaaggccagtgagcctcttcgcttctccctggactagtcctacatggctgaagactaatggtgcttacaatgggaagggctccctgaaaggacagccaggtgacatatatcatcagacatgggcccgctactttgtgaaattccttgatgcctatgcagagcacgggctccaattctgggcagtcaccgcagaaaacgagccctcagctgggctgctgtctggctacccctttcagtgcttgggctttactcctgagcatcaacgggacttcattgcccgggatttggggccaacactggccaacagcacccaccacaatgtaagactcctcattctggatgaccagaggctgctgctccctcattgggccaaggtggtgttgacaaacccagaagctgccaaatatgttcatggcatcgctgtccactggtacctggattttttggcccctgccaagtggactctgggagagacccacagactcttccccaataccacactgtttgcatcagaagcctgcgtggggagcaaattctgggagcagtctgttaggctgggttcctgggatcggggcacccaatattcccatagtataataactaacctcctctaccacgtggtaggatggacagactggaatctggctttgaacccagaaggaggccccaattgggtgcgcaactttgttgacagccccatcattgtggatatcacaaaggacaccttctacaaacagcctatgttctatcatctggggcactttagcaagttcattccagagggttccactagagtaggcttggttgcctcacagaagaatgatctggatgctgtggcactcctgcatcctgacgggagtgcagtggtggtagtactgaacaggtctagcaaagatgttcccttgactatcaaagacccagctgtgggctttctggaaaccatttcccctggatactctatccacacctatctctggagaagacag

SEQ ID NO: 1124 - protein, 536 aa, synthetic construct
  REGION 1..536: note = Variant of B-Glucocerebrosidase
MEFSSPSREECPKPLSRVSIMAGSLTGLLLLQAVSWASGARPCIPKSFGYSSVVCVCNATYCDSVDPLTLPALGTFSRYESTRSGRRMELSMGPIQANRTGTGLLLTLQPEQKFQKVKGFGGAMTDAAALNILALSPPAQNLLLKSYFSEEGIEYNIIRVPMASCDFSIRTYTYADTPDDFQLHNFSLPEEDTKWKIPLIHRALQLSQRPVSLFASPWTSPTWLKTNGAYNGKGSLKGQPGDIYHQTWARYFVKFLDAYAEHGLQFWAVTAENEPSAGLLSGYPFQCLGFTPEHQRDFIARDLGPTLANSTHHNVRLLILDDQRLLLPHWAKVVLTNPEAAKYVHGIAVHWYLDFLAPAKWTLGETHRLFPNTTLFASEACVGSKFWEQSVRLGSWDRGTQYSHSIITNLLYHVVGWTDWNLALNPEGGPNWVRNFVDSPIIVDITKDTFYKQPMFYHLGHFSKFIPEGSTRVGLVASQKNDLDAVALLHPDGSAVVVVLNRSSKDVPLTIKDPAVGFLETISPGYSIHTYLWRRQ

SEQ ID NO: 1125 - DNA, 1608 bp, synthetic construct
  misc_feature 1..1608: note = Variant of B-Glucocerebrosidase
  source 1..1608: mol_type = other DNA
atggagttttcttctcctagtagagaagaatgccccaagccactgagcagggtgagcatcatggctggatccctcacagggctgcttcttttgcaggcagtctcatgggcctctggagccaggccctgtattcccaagtcattcggctactcctcagtggtgtgtgtatgcaatgccacctattgtgacagtgtcgatcctctcactctccctgctctgggtaccttctcccggtatgagagcacaagaagtggaagacgcatggagctctcaatgggccctatacaggctaaccgcactgggacaggtctgctgctgaccctccaacctgaacagaagtttcagaaagtcaagggatttggaggagccatgactgatgcagcagcactcaacatcttggccctgtctccaccagcccagaacctgctgttgaagtcctacttctcagaggaggggattgagtacaacatcatccgggttcccatggctagctgtgacttctccattaggacctatacatacgctgacacccccgatgattttcagctccataatttcagtctccctgaagaagacaccaaatggaagatacctctgattcacagagccttgcaactgtcccaaaggccagtgagcctcttcgcttctccctggactagtcctacatggctgaagactaatggtgcttacaatgggaagggctccctgaaaggacagccaggtgacatatatcatcagacatgggcccgctactttgtgaaattccttgatgcctatgcagagcacgggctccaattctgggcagtcaccgcagaaaacgagccctcagctgggctgctgtctggctacccctttcagtgcttgggctttactcctgagcatcaacgggacttcattgcccgggatttggggccaacactggccaacagcacccaccacaatgtaagactcctcattctggatgaccagaggctgctgctccctcattgggccaaggtggtgttgacaaacccagaagctgcccagtatgttcatggcatcgctgtccactggtacctggattttttggcccctgccaagtggactctgggagagacccacagactcttccccaataccacactgtttgcatcagaagcctgcgtggggagcaaattctgggagcagtctgttaggctgggttcctgggatcggggcatgcaatattcccatagtataataactaacctcctctaccacgtggtaggatggacagactggaatctggctttgaacccagaaggaggccccaattgggtgcgcaactttgttgacagccccatcattgtggatatcacaaaggacaccttctacaaacagcctatgttctatcatctggggcactttagcaagttcattccagagggttccactagagtaggcttggttgcctcacagaagaatgatctggatgctgtggcactcctgcatcctgacgggagtgcagtggtggtagtactgaacaggtctagcaaagatgttcccttgactatcaaagacccagctgtgggctttctggaaaccatttcccctggatactctatccacacctatctctggagaagacag

SEQ ID NO: 1126 - protein, 536 aa, synthetic construct
  REGION 1..536: note = Variant of B-Glucocerebrosidase
MEFSSPSREECPKPLSRVSIMAGSLTGLLLLQAVSWASGARPCIPKSFGYSSVVCVCNATYCDSVDPLTLPALGTFSRYESTRSGRRMELSMGPIQANRTGTGLLLTLQPEQKFQKVKGFGGAMTDAAALNILALSPPAQNLLLKSYFSEEGIEYNIIRVPMASCDFSIRTYTYADTPDDFQLHNFSLPEEDTKWKIPLIHRALQLSQRPVSLFASPWTSPTWLKTNGAYNGKGSLKGQPGDIYHQTWARYFVKFLDAYAEHGLQFWAVTAENEPSAGLLSGYPFQCLGFTPEHQRDFIARDLGPTLANSTHHNVRLLILDDQRLLLPHWAKVVLTNPEAAQYVHGIAVHWYLDFLAPAKWTLGETHRLFPNTTLFASEACVGSKFWEQSVRLGSWDRGMQYSHSIITNLLYHVVGWTDWNLALNPEGGPNWVRNFVDSPIIVDITKDTFYKQPMFYHLGHFSKFIPEGSTRVGLVASQKNDLDAVALLHPDGSAVVVVLNRSSKDVPLTIKDPAVGFLETISPGYSIHTYLWRRQ

SEQ ID NO: 1127 - DNA, 1608 bp, synthetic construct
  misc_feature 1..1608: note = Variant of B-Glucocerebrosidase
  source 1..1608: mol_type = other DNA
atggagttttcttctcctagtagagaagaatgccccaagccactgagcagggtgagcatcatggctggatccctcacagggctgcttcttttgcaggcagtctcatgggcctctggagccaggccctgtattcccaagtcattcggctactcctcagtggtgtgtgtatgcaatgccacctattgtgacagtgtcgatcctctcactctccctgctctgggtaccttctcccggtatgagagcacaagaagtggaagacgcatggagctctcaatgggccctatacaggctaaccgcactgggacaggtctgctgctgaccctccaacctgaacagaagtttcagaaagtcaagggatttggaggagccatgactgatgcagcagcactcaacatcttggccctgtctccaccagcccagaacctgctgttgaagtcctacttctcagaggaggggattgagtacaacatcatccgggttcccatggctagctgtgacttctccattaggacctatacatacgctgacacccccgatgattttcagctccataatttcagtctccctgaagaagacaccaaatggaagatacctctgattcacagagccttgcaactgtcccaaaggccagtgagcctcttcgcttctccctggactagtcctacatggctgaagactaatggtgcttacaatgggaagggctccctgaaaggacagccaggtgacatatatcatcagacatgggcccgctactttgtgaaattccttgatgcctatgcagagcacgggctccaattctgggcagtcaccgcagaaaacgagccctcagctgggctgctgtctggctacccctttcagtgcttgggctttactcctgagcatcaacgggacttcattgcccgggatttggggccaacactggccaacagcacccaccacaatgtaagactcctcattctggatgaccagaggctgctgctccctcattgggccaaggtggtgttgacaaacccagaagctgccaaatatgttcatggcatcgctgtccactggtacctggattttttggcccctgccaagtggactctgggagagacccacagactcttccccaataccacactgtttgcatcagaagcctgcgtggggagcaaattctgggagcagtctgttaggctgggttcctgggatcggggcgagcaatattcccatagtataataactaacctcctctaccacgtggtaggatggacagactggaatctggctttgaacccagaaggaggccccaattgggtgcgcaactttgttgacagccccatcattgtggatatcacaaaggacaccttctacaaacagcctatgttctatcatctggggcactttagcaagttcattccagagggttccactagagtaggcttggttgcctcacagaagaatgatctggatgctgtggcactcctgcatcctgacgggagtgcagtggtggtagtactgaacaggtctagcaaagatgttcccttgactatcaaagacccagctgtgggctttctggaaaccatttcccctggatactctatccacacctatctctggagaagacag

SEQ ID NO: 1128 - protein, 536 aa, synthetic construct
  REGION 1..536: note = Variant of B-Glucocerebrosidase
MEFSSPSREECPKPLSRVSIMAGSLTGLLLLQAVSWASGARPCIPKSFGYSSVVCVCNATYCDSVDPLTLPALGTFSRYESTRSGRRMELSMGPIQANRTGTGLLLTLQPEQKFQKVKGFGGAMTDAAALNILALSPPAQNLLLKSYFSEEGIEYNIIRVPMASCDFSIRTYTYADTPDDFQLHNFSLPEEDTKWKIPLIHRALQLSQRPVSLFASPWTSPTWLKTNGAYNGKGSLKGQPGDIYHQTWARYFVKFLDAYAEHGLQFWAVTAENEPSAGLLSGYPFQCLGFTPEHQRDFIARDLGPTLANSTHHNVRLLILDDQRLLLPHWAKVVLTNPEAAKYVHGIAVHWYLDFLAPAKWTLGETHRLFPNTTLFASEACVGSKFWEQSVRLGSWDRGEQYSHSIITNLLYHVVGWTDWNLALNPEGGPNWVRNFVDSPIIVDITKDTFYKQPMFYHLGHFSKFIPEGSTRVGLVASQKNDLDAVALLHPDGSAVVVVLNRSSKDVPLTIKDPAVGFLETISPGYSIHTYLWRRQ

SEQ ID NO: 1129 - DNA, 1608 bp, synthetic construct
  misc_feature 1..1608: note = Variant of B-Glucocerebrosidase
  source 1..1608: mol_type = other DNA
atggagttttcttctcctagtagagaagaatgccccaagccactgagcagggtgagcatcatggctggatccctcacagggctgcttcttttgcaggcagtctcatgggcctctggagccaggccctgtattcccaagtcattcggctactcctcagtggtgtgtgtatgcaatgccacctattgtgacagtgtcgatcctctcactctccctgctctgggtaccttctcccggtatgagagcacaagaagtggaagacgcatggagctctcaatgggccctatacaggctaaccgcactgggacaggtctgctgctgaccctccaacctgaacagaagtttcagaaagtcaagggatttggaggagccatgactgatgcagcagcactcaacatcttggccctgtctccaccagcccagaacctgctgttgaagtcctacttctcagaggaggggattgagtacaacatcatccgggttcccatggctagctgtgacttctccattaggacctatacatacgctgacacccccgatgattttcagctccataatttcagtctccctgaagaagacaccaaatggaagatacctctgattcacagagccttgcaactgtcccaaaggccagtgagcctcttcgcttctccctggactagtcctacatggctgaagactaatggtgcttacaatgggaagggctccctgaaaggacagccaggtgacatatatcatcagacatgggcccgctactttgtgaaattccttgatgcctatgcagagcacgggctccaattctgggcagtcaccgcagaaaacgagccctcagctgggctgctgtctggctacccctttcagtgcttgggctttactcctgagcatcaacgggacttcattgcccgggatttggggccaacactggccaacagcacccaccacaatgtaagactcctcattctggatgaccagaggctgctgctccctcattgggccaaggtggtgttgacaaacccagaagctgccaaatatgttcatggcatcgctgtccactggtacctggattttttggcccctgccaagtggactctgggagagacccacagactcttccccaataccacactgtttgcatcagaagcctgcgtggggagcaaattctgggagcagtctgttaggctgggttcctgggatcggggccagcaatattcccatagtataataactaacctcctctaccacgtggtaggatggacagactggaatctggctttgaacccagaaggaggccccaattgggtgcgcaactttgttgacagccccatcattgtggatatcacaaaggacaccttctacaaacagcctatgttctatcatctggggcactttagcaagttcattccagagggttccactagagtaggcttggttgcctcacagaagaatgatctggatgctgtggcactcctgcatcctgacgggagtgcagtggtggtagtactgaacaggtctagcaaagatgttcccttgactatcaaagacccagctgtgggctttctggaaaccatttcccctggatactctatccacacctatctctggagaagacag

SEQ ID NO: 1130 - protein, 536 aa, synthetic construct
  REGION 1..536: note = Variant of B-Glucocerebrosidase
MEFSSPSREECPKPLSRVSIMAGSLTGLLLLQAVSWASGARPCIPKSFGYSSVVCVCNATYCDSVDPLTLPALGTFSRYESTRSGRRMELSMGPIQANRTGTGLLLTLQPEQKFQKVKGFGGAMTDAAALNILALSPPAQNLLLKSYFSEEGIEYNIIRVPMASCDFSIRTYTYADTPDDFQLHNFSLPEEDTKWKIPLIHRALQLSQRPVSLFASPWTSPTWLKTNGAYNGKGSLKGQPGDIYHQTWARYFVKFLDAYAEHGLQFWAVTAENEPSAGLLSGYPFQCLGFTPEHQRDFIARDLGPTLANSTHHNVRLLILDDQRLLLPHWAKVVLTNPEAAKYVHGIAVHWYLDFLAPAKWTLGETHRLFPNTTLFASEACVGSKFWEQSVRLGSWDRGQQYSHSIITNLLYHVVGWTDWNLALNPEGGPNWVRNFVDSPIIVDITKDTFYKQPMFYHLGHFSKFIPEGSTRVGLVASQKNDLDAVALLHPDGSAVVVVLNRSSKDVPLTIKDPAVGFLETISPGYSIHTYLWRRQ

SEQ ID NO: 1131 - DNA, 1608 bp, synthetic construct
  misc_feature 1..1608: note = Variant of B-Glucocerebrosidase
  source 1..1608: mol_type = other DNA
atggagttttcttctcctagtagagaagaatgccccaagccactgagcagggtgagcatcatggctggatccctcacagggctgcttcttttgcaggcagtctcatgggcctctggagccaggccctgtattcccaagtcattcggctactcctcagtggtgtgtgtatgcaatgccacctattgtgacagtgtcgatcctctcactctccctgctctgggtaccttctcccggtatgagagcacaagaagtggaagacgcatggagctctcaatgggccctatacaggctaaccgcactgggacaggtctgctgctgaccctccaacctgaacagaagtttcagaaagtcaagggatttggaggagccatgactgatgcagcagcactcaacatcttggccctgtctccaccagcccagaacctgctgttgaagtcctacttctcagaggaggggattgagtacaacatcatccgggttcccatggctagctgtgacttctccattaggacctatacatacgctgacacccccgatgattttcagctccataatttcagtctccctgaagaagacaccaaatggaagatacctctgattcacagagccttgcaactgtcccaaaggccagtgagcctcttcgcttctccctggactagtcctacatggctgaagactaatggtgcttacaatgggaagggctccctgaaaggacagccaggtgacatatatcatcagacatgggcccgctactttgtgaaattccttgatgcctatgcagagcacgggctccaattctgggcagtcaccgcagaaaacgagccctcagctgggctgctgtctggctacccctttcagtgcttgggctttactcctgagcatcaacgggacttcattgcccgggatttggggccaacactggccaacagcacccaccacaatgtaagactcctcattctggatgaccagaggctgctgctccctcattgggccaaggtggtgttgacaaacccagaagctgccaaatatgttcatggcatcgctgtccactggtacctggattttttggcccctgccaagtggactctgggagagacccacagactcttccccaataccacactgtttgcatcagaagcctgcgtggggagcaaattctgggagcaggcagttaggctgggttcctgggatcggggcatgcaatattcccatagtataataactaacctcctctaccacgtggtaggatggacagactggaatctggctttgaacccagaaggaggccccaattgggtgcgcaactttgttgacagccccatcattgtggatatcacaaaggacaccttctacaaacagcctatgttctatcatctggggcactttagcaagttcattccagagggttccactagagtaggcttggttgcctcacagaagaatgatctggatgctgtggcactcctgcatcctgacgggagtgcagtggtggtagtactgaacaggtctagcaaagatgttcccttgactatcaaagacccagctgtgggctttctggaaaccatttcccctggatactctatccacacctatctctggagaagacag

SEQ ID NO: 1132 - protein, 536 aa, synthetic construct
  REGION 1..536: note = Variant of B-Glucocerebrosidase
MEFSSPSREECPKPLSRVSIMAGSLTGLLLLQAVSWASGARPCIPKSFGYSSVVCVCNATYCDSVDPLTLPALGTFSRYESTRSGRRMELSMGPIQANRTGTGLLLTLQPEQKFQKVKGFGGAMTDAAALNILALSPPAQNLLLKSYFSEEGIEYNIIRVPMASCDFSIRTYTYADTPDDFQLHNFSLPEEDTKWKIPLIHRALQLSQRPVSLFASPWTSPTWLKTNGAYNGKGSLKGQPGDIYHQTWARYFVKFLDAYAEHGLQFWAVTAENEPSAGLLSGYPFQCLGFTPEHQRDFIARDLGPTLANSTHHNVRLLILDDQRLLLPHWAKVVLTNPEAAKYVHGIAVHWYLDFLAPAKWTLGETHRLFPNTTLFASEACVGSKFWEQAVRLGSWDRGMQYSHSIITNLLYHVVGWTDWNLALNPEGGPNWVRNFVDSPIIVDITKDTFYKQPMFYHLGHFSKFIPEGSTRVGLVASQKNDLDAVALLHPDGSAVVVVLNRSSKDVPLTIKDPAVGFLETISPGYSIHTYLWRRQ

SEQ ID NO: 1133 - DNA, 1608 bp, synthetic construct
  misc_feature 1..1608: note = Variant of B-Glucocerebrosidase
  source 1..1608: mol_type = other DNA
atggagttttcttctcctagtagagaagaatgccccaagccactgagcagggtgagcatcatggctggatccctcacagggctgcttcttttgcaggcagtctcatgggcctctggagccaggccctgtattcccaagtcattcggctactcctcagtggtgtgtgtatgcaatgccacctattgtgacagtgtcgatcctctcactctccctgctctgggtaccttctcccggtatgagagcacaagaagtggaagacgcatggagctctcaatgggccctatacaggctaaccgcactgggacaggtctgctgctgaccctccaacctgaacagaagtttcagaaagtcaagggatttggaggagccatgactgatgcagcagcactcaacatcttggccctgtctccaccagcccagaacctgctgttgaagtcctacttctcagaggaggggattgagtacaacatcatccgggttcccatggctagctgtgacttctccattaggacctatacatacgctgacacccccgatgattttcagctccataatttcagtctccctgaagaagacaccaaatggaagatacctctgattcacagagccttgcaactgtcccaaaggccagtgagcctcttcgcttctccctggactagtcctacatggctgaagactaatggtgcttacaatgggaagggctccctgaaaggacagccaggtgacatatatcatcagacatgggcccgctactttgtgaaattccttgatgcctatgcagagcacgggatacaattctgggcagtcaccgcagaaaacgagccctcagctgggctgctgtctggctacccctttcagtgcttgggctttactcctgagcatcaacgggacttcattgcccgggatttggggccaacactggccaacagcacccaccacaatgtaagactcctcattctggatgaccagaggctgctgctccctcattgggccaaggtggtgttgacaaacccagaagctgccaaatatgttcatggcatcgctgtccactggtacctggattttttggcccctgccaagtggactctgggagagacccacagactcttccccaataccacactgtttgcatcagaagcctgcgtggggagcaaattctgggagcagtctgttaggctgggttcctgggatcggggcatgcaatattcccatagtataataactaacctcctctaccacgtggtaggatggacagactggaatctggctttgaacccagaaggaggccccaattgggtgcgcaactttgttgacagccccatcattgtggatatcacaaaggacaccttctacaaacagcctatgttctatcatctggggcactttagcaagttcattccagagggttccactagagtaggcttggttgcctcacagaagaatgatctggatgctgtggcactcctgcatcctgacgggagtgcagtggtggtagtactgaacaggtctagcaaagatgttcccttgactatcaaagacccagctgtgggctttctggaaaccatttcccctggatactctatccacacctatctctggagaagacag

SEQ ID NO: 1134 - protein, 536 aa, synthetic construct
  REGION 1..536: note = Variant of B-Glucocerebrosidase
MEFSSPSREECPKPLSRVSIMAGSLTGLLLLQAVSWASGARPCIPKSFGYSSVVCVCNATYCDSVDPLTLPALGTFSRYESTRSGRRMELSMGPIQANRTGTGLLLTLQPEQKFQKVKGFGGAMTDAAALNILALSPPAQNLLLKSYFSEEGIEYNIIRVPMASCDFSIRTYTYADTPDDFQLHNFSLPEEDTKWKIPLIHRALQLSQRPVSLFASPWTSPTWLKTNGAYNGKGSLKGQPGDIYHQTWARYFVKFLDAYAEHGIQFWAVTAENEPSAGLLSGYPFQCLGFTPEHQRDFIARDLGPTLANSTHHNVRLLILDDQRLLLPHWAKVVLTNPEAAKYVHGIAVHWYLDFLAPAKWTLGETHRLFPNTTLFASEACVGSKFWEQSVRLGSWDRGMQYSHSIITNLLYHVVGWTDWNLALNPEGGPNWVRNFVDSPIIVDITKDTFYKQPMFYHLGHFSKFIPEGSTRVGLVASQKNDLDAVALLHPDGSAVVVVLNRSSKDVPLTIKDPAVGFLETISPGYSIHTYLWRRQ

SEQ ID NO: 1135 - DNA, 1608 bp, synthetic construct
  misc_feature 1..1608: note = Variant of B-Glucocerebrosidase
  source 1..1608: mol_type = other DNA
atggagttttcttctcctagtagagaagaatgccccaagccactgagcagggtgagcatcatggctggatccctcacagggctgcttcttttgcaggcagtctcatgggcctctggagccaggccctgtattcccaagtcattcggctactcctcagtggtgtgtgtatgcaatgccacctattgtgacagtgtcgatcctctcactctccctgctctgggtaccttctcccggtatgagagcacaagaagtggaagacgcatggagctctcaatgggccctatacaggctaaccgcactgggacaggtctgctgctgaccctccaacctgaacagaagtttcagaaagtcaagggatttggaggagccatgactgatgcagcagcactcaacatcttggccctgtctccaccagcccagaacctgctgttgaagtcctacttctcagaggaggggattgagtacaacatcatccgggttcccatggctagctgtgacttctccattaggacctatacatacgctgacacccccgatgattttcagctccataatttcagtctccctgaagaagacaccaaatggaagatacctctgattcacagagccttgcaactgtcccaaaggccagtgagcctcttcgcttctccctggactagtcctacatggctgaagactaatggtgcttacaatgggaagggctccctgaaaggacagccaggtgacatatatcatcagacatgggcccgctactttgtgaaattccttgatgcctatgcagagcacgggctccaattctgggcagtcaccgcagaaaacgagccctcagctgggctgctgtctggctacccctttcagtgcttgggctttactcctgagcatcaacgggactggattgcccgggatttggggccaacactggccaacagcacccaccacaatgtaagactcctcattctggatgaccagaggctgctgctccctcattgggccaaggtggtgttgacaaacccagaagctgccaaatatgttcatggcatcgctgtccactggtacctggattttttggcccctgccaagtggactctgggagagacccacagactcttccccaataccacactgtttgcatcagaagcctgcgtggggagcaaattctgggagcagtctgttaggctgggttcctgggatcggggcatgcaatattcccatagtataataactaacctcctctaccacgtggtaggatggacagactggaatctggctttgaacccagaaggaggccccaattgggtgcgcaactttgttgacagccccatcattgtggatatcacaaaggacaccttctacaaacagcctatgttctatcatctggggcactttagcaagttcattccagagggttccactagagtaggcttggttgcctcacagaagaatgatctggatgctgtggcactcctgcatcctgacgggagtgcagtggtggtagtactgaacaggtctagcaaagatgttcccttgactatcaaagacccagctgtgggctttctggaaaccatttcccctggatactctatccacacctatctctggagaagacag

SEQ ID NO: 1136 - protein, 536 aa, synthetic construct
  REGION 1..536: note = Variant of B-Glucocerebrosidase
MEFSSPSREECPKPLSRVSIMAGSLTGLLLLQAVSWASGARPCIPKSFGYSSVVCVCNATYCDSVDPLTLPALGTFSRYESTRSGRRMELSMGPIQANRTGTGLLLTLQPEQKFQKVKGFGGAMTDAAALNILALSPPAQNLLLKSYFSEEGIEYNIIRVPMASCDFSIRTYTYADTPDDFQLHNFSLPEEDTKWKIPLIHRALQLSQRPVSLFASPWTSPTWLKTNGAYNGKGSLKGQPGDIYHQTWARYFVKFLDAYAEHGLQFWAVTAENEPSAGLLSGYPFQCLGFTPEHQRDWIARDLGPTLANSTHHNVRLLILDDQRLLLPHWAKVVLTNPEAAKYVHGIAVHWYLDFLAPAKWTLGETHRLFPNTTLFASEACVGSKFWEQSVRLGSWDRGMQYSHSIITNLLYHVVGWTDWNLALNPEGGPNWVRNFVDSPIIVDITKDTFYKQPMFYHLGHFSKFIPEGSTRVGLVASQKNDLDAVALLHPDGSAVVVVLNRSSKDVPLTIKDPAVGFLETISPGYSIHTYLWRRQ

SEQ ID NO: 1137 - DNA, 1608 bp, synthetic construct
  misc_feature 1..1608: note = Variant of B-Glucocerebrosidase
  source 1..1608: mol_type = other DNA
atggagttttcttctcctagtagagaagaatgccccaagccactgagcagggtgagcatcatggctggatccctcacagggctgcttcttttgcaggcagtctcatgggcctctggagccaggccctgtattcccaagtcattcggctactcctcagtggtgtgtgtatgcaatgccacctattgtgacagtgtcgatcctctcactctccctgctctgggtaccttctcccggtatgagagcacaagaagtggaagacgcatggagctctcaatgggccctatacaggctaaccgcactgggacaggtctgctgctgaccctccaacctgaacagaagtttcagaaagtcaagggatttggaggagccatgactgatgcagcagcactcaacatcttggccctgtctccaccagcccagaacctgctgttgaagtcctacttctcagaggaggggattgagtacaacatcatccgggttcccatggctagctgtgacttctccattaggacctatacatacgctgacacccccgatgattttcagctccataatttcagtctccctgaagaagacaccaaatggaagatacctctgattcacagagccttgcaactgtcccaaaggccagtgagcctcttcgcttctccctggactagtcctacatggctgaagactaatggtgcttacaatgggaagggctccctgaaaggacagccaggtgacatatatcatcagacatgggcccgctactttgtgaaattccttgatgcctatgcagagcacgggctccaattctgggcagtcaccgcagaaaacgagccctcagctgggctgctgtctggctacccctttcagtgcttgggctttactcctgagcatcaacgggacttcattgcccgggatttggggccaacactggccaacagcacccaccacaatgtaagactcctcattctggatgaccagaggctgctgctccctcattgggccaaggtggtgttgacaaacccagaagctgccaaatatgttcatggcatcgctgtccactggtacctggattttttggcccctgccaagtggactctgggagagacccacagactcttccccaataccacactgtttgcatcagaagcctgcgctgggagcaaattctgggagcagtctgttaggctgggttcctgggatcggggcatgcaatattcccatagtataataactaacctcctctaccacgtggtaggatggacagactggaatctggctttgaacccagaaggaggccccaattgggtgcgcaactttgttgacagccccatcattgtggatatcacaaaggacaccttctacaaacagcctatgttctatcatctggggcactttagcaagttcattccagagggttccactagagtaggcttggttgcctcacagaagaatgatctggatgctgtggcactcctgcatcctgacgggagtgcagtggtggtagtactgaacaggtctagcaaagatgttcccttgactatcaaagacccagctgtgggctttctggaaaccatttcccctggatactctatccacacctatctctggagaagacag

SEQ ID NO: 1138 - protein, 536 aa, synthetic construct
  REGION 1..536: note = Variant of B-Glucocerebrosidase
MEFSSPSREECPKPLSRVSIMAGSLTGLLLLQAVSWASGARPCIPKSFGYSSVVCVCNATYCDSVDPLTLPALGTFSRYESTRSGRRMELSMGPIQANRTGTGLLLTLQPEQKFQKVKGFGGAMTDAAALNILALSPPAQNLLLKSYFSEEGIEYNIIRVPMASCDFSIRTYTYADTPDDFQLHNFSLPEEDTKWKIPLIHRALQLSQRPVSLFASPWTSPTWLKTNGAYNGKGSLKGQPGDIYHQTWARYFVKFLDAYAEHGLQFWAVTAENEPSAGLLSGYPFQCLGFTPEHQRDFIARDLGPTLANSTHHNVRLLILDDQRLLLPHWAKVVLTNPEAAKYVHGIAVHWYLDFLAPAKWTLGETHRLFPNTTLFASEACAGSKFWEQSVRLGSWDRGMQYSHSIITNLLYHVVGWTDWNLALNPEGGPNWVRNFVDSPIIVDITKDTFYKQPMFYHLGHFSKFIPEGSTRVGLVASQKNDLDAVALLHPDGSAVVVVLNRSSKDVPLTIKDPAVGFLETISPGYSIHTYLWRRQ

SEQ ID NO: 1139 - DNA, 1608 bp, synthetic construct
  misc_feature 1..1608: note = Variant of B-Glucocerebrosidase
  source 1..1608: mol_type = other DNA
atggagttttcttctcctagtagagaagaatgccccaagccactgagcagggtgagcatcatggctggatccctcacagggctgcttcttttgcaggcagtctcatgggcctctggagccaggccctgtattcccaagtcattcggctactcctcagtggtgtgtgtatgcaatgccacctattgtgacagtgtcgatcctctcactctccctgctctgggtaccttctcccggtatgagagcacaagaagtggaagacgcatggagctctcaatgggccctatacaggctaaccgcactgggacaggtctgctgctgaccctccaacctgaacagaagtttcagaaagtcaagggatttggaggagccatgactgatgcagcagcactcaacatcttggccctgtctccaccagcccagaacctgctgttgaagtcctacttctcagaggaggggattgagtacaacatcatccgggttcccatggctagctgtgacttctccattaggacctatacatacgctgacacccccgatgattttcagctccataatttcagtctccctgaagaagacaccaaatggaagatacctctgattcacagagccttgcaactgtcccaaaggccagtgagcctcttcgcttctccctggactagtcctacatggctgaagactaatggtgcttacaatgggaagggctccctgaaaggacagccaggtgacatatatcatcagacatgggcccgctactttgtgaaattccttgatgcctatgcagagcacgggctccaattctgggcagtcaccgcagaaaacgagccctcagctgggctgctgtctggctacccctttcagtgcttgggctttactcctgagcatcaacgggacttcattgcccgggatttggggccaacactggccaacagcacccaccacaatgtaagactcctcattctggatgaccagaggctgctgctccctcattgggccaaggtggtgttgacaaacccagaagctgccaaatatgttcatggcatcgctgtccactggtacctggattttttggcccctgccaagtggactctgggagagacccacagactcttccccaataccacactgtttgcatcagaagcctgcgtggggagcaaattctgggagcagtctgttaggctgggttcctgggatcggggcatgcaatattcccatagtataatagacaacctcctctaccacgtggtaggatggacagactggaatctggctttgaacccagaaggaggccccaattgggtgcgcaactttgttgacagccccatcattgtggatatcacaaaggacaccttctacaaacagcctatgttctatcatctggggcactttagcaagttcattccagagggttccactagagtaggcttggttgcctcacagaagaatgatctggatgctgtggcactcctgcatcctgacgggagtgcagtggtggtagtactgaacaggtctagcaaagatgttcccttgactatcaaagacccagctgtgggctttctggaaaccatttcccctggatactctatccacacctatctctggagaagacag

SEQ ID NO: 1140 - protein, 536 aa, synthetic construct
  REGION 1..536: note = Variant of B-Glucocerebrosidase
MEFSSPSREECPKPLSRVSIMAGSLTGLLLLQAVSWASGARPCIPKSFGYSSVVCVCNATYCDSVDPLTLPALGTFSRYESTRSGRRMELSMGPIQANRTGTGLLLTLQPEQKFQKVKGFGGAMTDAAALNILALSPPAQNLLLKSYFSEEGIEYNIIRVPMASCDFSIRTYTYADTPDDFQLHNFSLPEEDTKWKIPLIHRALQLSQRPVSLFASPWTSPTWLKTNGAYNGKGSLKGQPGDIYHQTWARYFVKFLDAYAEHGLQFWAVTAENEPSAGLLSGYPFQCLGFTPEHQRDFIARDLGPTLANSTHHNVRLLILDDQRLLLPHWAKVVLTNPEAAKYVHGIAVHWYLDFLAPAKWTLGETHRLFPNTTLFASEACVGSKFWEQSVRLGSWDRGMQYSHSIIDNLLYHVVGWTDWNLALNPEGGPNWVRNFVDSPIIVDITKDTFYKQPMFYHLGHFSKFIPEGSTRVGLVASQKNDLDAVALLHPDGSAVVVVLNRSSKDVPLTIKDPAVGFLETISPGYSIHTYLWRRQ

SEQ ID NO: 1141 - DNA, 1608 bp, synthetic construct
  misc_feature 1..1608: note = Variant of B-Glucocerebrosidase
  source 1..1608: mol_type = other DNA
atggagttttcttctcctagtagagaagaatgccccaagccactgagcagggtgagcatcatggctggatccctcacagggctgcttcttttgcaggcagtctcatgggcctctggagccaggccctgtattcccaagtcattcggctactcctcagtggtgtgtgtatgcaatgccacctattgtgacagtgtcgatcctctcactctccctgctctgggtaccttctcccggtatgagagcacaagaagtggaagacgcatggagctctcaatgggccctatacaggctaaccgcactgggacaggtctgctgctgaccctccaacctgaacagaagtttcagaaagtcaagggatttggaggagccatgactgatgcagcagcactcaacatcttggccctgtctccaccagcccagaacctgctgttgaagtcctacttctcagaggaggggattgagtacaacatcatccgggttcccatggctagctgtgacttctccattaggacctatacatacgctgacacccccgatgattttcagctccataatttcagtctccctgaagaagacaccaaatggaagatacctctgattcacagagccttgcaactgtcccaaaggccagtgagcctcttcgcttctccctggactagtcctacatggctgaagactaatggtgcttacaatgggaagggctccctgaaaggacagccaggtgacatatatcatcagacatgggcccgctactttgtgaaattccttgatgcctatgcagagcacgggctccaattctgggcagtcaccgcagaaaacgagccctcagctgggctgctgtctggctacccctttcagtgcttgggctttactcctgagcatcaacgggacttcattgcccgggatttggggccaacactggccaacagcacccaccacaatgtaagactcctcattctggatgaccagaggctgctgctccctcattgggccaaggtggtgttgacaaacccagaagctgccaaatatgttcatggcatcgctgtccactggtacctggattttttggcccctgccaagtggactctgggagagacccacagactcttccccaataccacactgtttgcatcagaagcctgcgtggggagcaaattctgggagcagtctgttaggctgggttcctgggatcggggcatgcaatattcccatagtataataactaacctcctctaccacgtggtaggatggacagactggaatctggctttgaacccagaaggaggccccaattgggtgcgcaactttgttgacagccccatcattgtggatatcacaaaggacgaattctacaaacagcctatgttctatcatctggggcactttagcaagttcattccagagggttccactagagtaggcttggttgcctcacagaagaatgatctggatgctgtggcactcctgcatcctgacgggagtgcagtggtggtagtactgaacaggtctagcaaagatgttcccttgactatcaaagacccagctgtgggctttctggaaaccatttcccctggatactctatccacacctatctctggagaagacag

SEQ ID NO: 1142 - protein, 536 aa, synthetic construct
  REGION 1..536: note = Variant of B-Glucocerebrosidase
MEFSSPSREECPKPLSRVSIMAGSLTGLLLLQAVSWASGARPCIPKSFGYSSVVCVCNATYCDSVDPLTLPALGTFSRYESTRSGRRMELSMGPIQANRTGTGLLLTLQPEQKFQKVKGFGGAMTDAAALNILALSPPAQNLLLKSYFSEEGIEYNIIRVPMASCDFSIRTYTYADTPDDFQLHNFSLPEEDTKWKIPLIHRALQLSQRPVSLFASPWTSPTWLKTNGAYNGKGSLKGQPGDIYHQTWARYFVKFLDAYAEHGLQFWAVTAENEPSAGLLSGYPFQCLGFTPEHQRDFIARDLGPTLANSTHHNVRLLILDDQRLLLPHWAKVVLTNPEAAKYVHGIAVHWYLDFLAPAKWTLGETHRLFPNTTLFASEACVGSKFWEQSVRLGSWDRGMQYSHSIITNLLYHVVGWTDWNLALNPEGGPNWVRNFVDSPIIVDITKDEFYKQPMFYHLGHFSKFIPEGSTRVGLVASQKNDLDAVALLHPDGSAVVVVLNRSSKDVPLTIKDPAVGFLETISPGYSIHTYLWRRQ

SEQ ID NO: 1143 - DNA, 1608 bp, synthetic construct
  misc_feature 1..1608: note = Variant of B-Glucocerebrosidase
  source 1..1608: mol_type = other DNA
atggagttttcttctcctagtagagaagaatgccccaagccactgagcagggtgagcatcatggctggatccctcacagggctgcttcttttgcaggcagtctcatgggcctctggagccaggccctgtattcccaagtcattcggctactcctcagtggtgtgtgtatgcaatgccacctattgtgacagtgtcgatcctctcactctccctgctctgggtaccttctcccggtatgagagcacaagaagtggaagacgcatggagctctcaatgggccctatacaggctaaccgcactgggacaggtctgctgctgaccctccaacctgaacagaagtttcagaaagtcaagggatttggaggagccatgactgatgcagcagcactcaacatcttggccctgtctccaccagcccagaacctgctgttgaagtcctacttctcagaggaggggattgagtacaacatcatccgggttcccatggctagctgtgacttctccattaggacctatacatacgctgacacccccgatgattttcagctccataatttcagtctccctgaagaagacaccaaatggaagatacctctgattcacagagccttgcaactgtcccaaaggccagtgagcctcttcgcttctccctggactagtcctacatggctgaagactaatggtgcttacaatgggaagggctccctgaaaggacagccaggtgacatatatcatcagacatgggcccgctactttgtgaaattccttgatgcctatgcagagcacgggctccaattctgggcagtcaccgcagaaaacgagccctcagctgggctgctgtctggctacccctttcagtgcttgggctttactcctgagcatcaacgggacttcattgcccgggatttggggccaacactggccaacagcacccaccacaatgtaagactcctcattctggatgaccagaggctgctgctccctcattgggccaaggtggtgttgacaaacccagaagctgccaaatatgttcatggcatcgctgtccactggtacctggattttttggcccctgccaagtggactctgggagagacccacagactcttccccaataccacactgtttgcatcagaagcctgcgtggggagcaaattctgggagcagtctgttaggctgggttcctgggatcggggcatgcaatattcccatagtataataactaacctcctctaccacgtggtaggatggacagactggaatctggctttgaacccagaaggaggccccaattgggtgcgcaactttgttgacagccccatcattgtggatatcacaaaggacaccttctacaaacagcctatgttctatcatatggggcactttagcaagttcattccagagggttccactagagtaggcttggttgcctcacagaagaatgatctggatgctgtggcactcctgcatcctgacgggagtgcagtggtggtagtactgaacaggtctagcaaagatgttcccttgactatcaaagacccagctgtgggctttctggaaaccatttcccctggatactctatccacacctatctctggagaagacag

SEQ ID NO: 1144 - protein, 536 aa, synthetic construct
  REGION 1..536: note = Variant of B-Glucocerebrosidase
MEFSSPSREECPKPLSRVSIMAGSLTGLLLLQAVSWASGARPCIPKSFGYSSVVCVCNATYCDSVDPLTLPALGTFSRYESTRSGRRMELSMGPIQANRTGTGLLLTLQPEQKFQKVKGFGGAMTDAAALNILALSPPAQNLLLKSYFSEEGIEYNIIRVPMASCDFSIRTYTYADTPDDFQLHNFSLPEEDTKWKIPLIHRALQLSQRPVSLFASPWTSPTWLKTNGAYNGKGSLKGQPGDIYHQTWARYFVKFLDAYAEHGLQFWAVTAENEPSAGLLSGYPFQCLGFTPEHQRDFIARDLGPTLANSTHHNVRLLILDDQRLLLPHWAKVVLTNPEAAKYVHGIAVHWYLDFLAPAKWTLGETHRLFPNTTLFASEACVGSKFWEQSVRLGSWDRGMQYSHSIITNLLYHVVGWTDWNLALNPEGGPNWVRNFVDSPIIVDITKDTFYKQPMFYHMGHFSKFIPEGSTRVGLVASQKNDLDAVALLHPDGSAVVVVLNRSSKDVPLTIKDPAVGFLETISPGYSIHTYLWRRQ

SEQ ID NO: 1145 - DNA, 1608 bp, synthetic construct
  misc_feature 1..1608: note = Variant of B-Glucocerebrosidase
  source 1..1608: mol_type = other DNA
atggagttttcttctcctagtagagaagaatgccccaagccactgagcagggtgagcatcatggctggatccctcacagggctgcttcttttgcaggcagtctcatgggcctctggagccaggccctgtattcccaagtcattcggctactcctcagtggtgtgtgtatgcaatgccacctattgtgacagtgtcgatcctctcactctccctgctctgggtaccttctcccggtatgagagcacaagaagtggaagacgcatggagctctcaatgggccctatacaggctaaccgcactgggacaggtctgctgctgaccctccaacctgaacagaagtttcagaaagtcaagggatttggaggagccatgactgatgcagcagcactcaacatcttggccctgtctccaccagcccagaacctgctgttgaagtcctacttctcagaggaggggattgagtacaacatcatccgggttcccatggctagctgtgacttctccattaggacctatacatacgctgacacccccgatgattttcagctccataatttcagtctccctgaagaagacaccaaatggaagatacctctgattcacagagccttgcaactgtcccaaaggccagtgagcctcttcgcttctccctggactagtcctacatggctgaagactaatggtgcttacaatgggaagggctccctgaaaggacagccaggtgacatatatcatcagacatgggcccgctactttgtgaaattccttgatgcctatgcagagcacgggctccaattctgggcagtcaccgcagaaaacgagccctcagctgggctgctgtctggctacccctttcagtgcttgggctttactcctgagcatcaacgggacttcattgcccgggatttggggccaacactggccaacagcacccaccacaatgtaagactcctcattctggatgaccagaggctgctgctccctcattgggccaaggtggtgttgacaaacccagaagctgccaaatatgttcatggcatcgctgtccactggtacctggattttttggcccctgccaagtggactctgggagagacccacagactcttccccaataccacactgtttgcatcagaagcctgcgtggggagcaaattctgggagcagtctgttaggctgggttcctgggatcggggcatgcaatattcccatagtataataactaacctcctctaccacgtggtaggatggacagactggaatctggctttgaacccagaaggaggccccaattgggtggggaactttgttgacagccccatcattgtggatatcacaaaggacaccttctacaaacagcctatgttctatcatctggggcactttagcaagttcattccagagggttccactagagtaggcttggttgcctcacagaagaatgatctggatgctgtggcactcctgcatcctgacgggagtgcagtggtggtagtactgaacaggtctagcaaagatgttcccttgactatcaaagacccagctgtgggctttctggaaaccatttcccctggatactctatccacacctatctctggagaagacag

SEQ ID NO: 1146 - protein, 536 aa, synthetic construct
  REGION 1..536: note = Variant of B-Glucocerebrosidase
MEFSSPSREECPKPLSRVSIMAGSLTGLLLLQAVSWASGARPCIPKSFGYSSVVCVCNATYCDSVDPLTLPALGTFSRYESTRSGRRMELSMGPIQANRTGTGLLLTLQPEQKFQKVKGFGGAMTDAAALNILALSPPAQNLLLKSYFSEEGIEYNIIRVPMASCDFSIRTYTYADTPDDFQLHNFSLPEEDTKWKIPLIHRALQLSQRPVSLFASPWTSPTWLKTNGAYNGKGSLKGQPGDIYHQTWARYFVKFLDAYAEHGLQFWAVTAENEPSAGLLSGYPFQCLGFTPEHQRDFIARDLGPTLANSTHHNVRLLILDDQRLLLPHWAKVVLTNPEAAKYVHGIAVHWYLDFLAPAKWTLGETHRLFPNTTLFASEACVGSKFWEQSVRLGSWDRGMQYSHSIITNLLYHVVGWTDWNLALNPEGGPNWVGNFVDSPIIVDITKDTFYKQPMFYHLGHFSKFIPEGSTRVGLVASQKNDLDAVALLHPDGSAVVVVLNRSSKDVPLTIKDPAVGFLETISPGYSIHTYLWRRQ

SEQ ID NO: 1147 - DNA, 1608 bp, synthetic construct
  misc_feature 1..1608: note = Variant of B-Glucocerebrosidase
  source 1..1608: mol_type = other DNA
atggagttttcttctcctagtagagaagaatgccccaagccactgagcagggtgagcatcatggctggatccctcacagggctgcttcttttgcaggcagtctcatgggcctctggagccaggccctgtattcccaagtcattcggctactcctcagtggtgtgtgtatgcaatgccacctattgtgacagtgtcgatcctctcactctccctgctctgggtaccttctcccggtatgagagcacaagaagtggaagacgcatggagctctcaatgggccctatacaggctaaccgcactgggacaggtctgctgctgaccctccaacctgaacagaagtttcagaaagtcaagggatttggaggagccatgactgatgcagcagcactcaacatcttggccctgtctccaccagcccagaacctgctgttgaagtcctacttctcagaggaggggattgagtacaacatcatccgggttcccatggctagctgtgacttctccattaggacctatacatacgctgacacccccgatgattttcagctccataatttcagtctccctgaagaagacaccaaatggaagatacctctgattcacagagccttgcaactgtcccaaaggccagtgagcctcttcgcttctccctggactagtcctacatggctgaagactaatggtgcttacaatgggaagggctccctgaaaggacagccaggtgacatatatcatcagacatgggcccgctactttgtgaaattccttgatgcctatgcagagcacgggctccaattctgggcagtcaccgcagaaaacgagccctcagctgggctgctgtctggctacccctttcagtgcttgggctttactcctgagcatcaacgggacttcattgcccgggatttggggccaacactggccaacagcacccaccacaatgtaagactcctcattctggatgaccagaggctgctgctccctcattgggccaaggtggtgttgacaaacccagaagctgccaaatatgttcatggcatcgctgtccactggtacctggattttttggcccctgccaagtggactctgggagagacccacagactcttccccaataccacactgtttgcatcagaagcctgcgtggggagcaaattctgggagcagtctgttaggctgggttcctgggatcggggcatgcaatattcccatagtataataactaacctcctctaccacgtggtaggatggacagactggaatctggctttgaacccagaaggaggccccaattgggtgcgcaactttgttgacagccccatcattgtggatatcacaaaggacaccttctacaaacagcctatgttctatcatctggggcactttagcaagttcattccagagggttccactagagtaggcttggctgcctcacagaagaatgatctggatgctgtggcactcctgcatcctgacgggagtgcagtggtggtagtactgaacaggtctagcaaagatgttcccttgactatcaaagacccagctgtgggctttctggaaaccatttcccctggatactctatccacacctatctctggagaagacag

SEQ ID NO: 1148 - protein, 536 aa, synthetic construct
  REGION 1..536: note = Variant of B-Glucocerebrosidase
MEFSSPSREECPKPLSRVSIMAGSLTGLLLLQAVSWASGARPCIPKSFGYSSVVCVCNATYCDSVDPLTLPALGTFSRYESTRSGRRMELSMGPIQANRTGTGLLLTLQPEQKFQKVKGFGGAMTDAAALNILALSPPAQNLLLKSYFSEEGIEYNIIRVPMASCDFSIRTYTYADTPDDFQLHNFSLPEEDTKWKIPLIHRALQLSQRPVSLFASPWTSPTWLKTNGAYNGKGSLKGQPGDIYHQTWARYFVKFLDAYAEHGLQFWAVTAENEPSAGLLSGYPFQCLGFTPEHQRDFIARDLGPTLANSTHHNVRLLILDDQRLLLPHWAKVVLTNPEAAKYVHGIAVHWYLDFLAPAKWTLGETHRLFPNTTLFASEACVGSKFWEQSVRLGSWDRGMQYSHSIITNLLYHVVGWTDWNLALNPEGGPNWVRNFVDSPIIVDITKDTFYKQPMFYHLGHFSKFIPEGSTRVGLAASQKNDLDAVALLHPDGSAVVVVLNRSSKDVPLTIKDPAVGFLETISPGYSIHTYLWRRQ

SEQ ID NO: 1149 - DNA, 1608 bp, synthetic construct
  misc_feature 1..1608: note = Variant of B-Glucocerebrosidase
  source 1..1608: mol_type = other DNA
atggagttttcttctcctagtagagaagaatgccccaagccactgagcagggtgagcatcatggctggatccctcacagggctgcttcttttgcaggcagtctcatgggcctctggagccaggccctgtattcccaagtcattcggctactcctcagtggtgtgtgtatgcaatgccacctattgtgacagtgtcgatcctctcactctccctgctctgggtaccttctcccggtatgagagcacaagaagtggaagacgcatggagctctcaatgggccctatacaggctaaccgcactgggacaggtctgctgctgaccctccaacctgaacagaagtttcagaaagtcaagggatttggaggagccatgactgatgcagcagcactcaacatcttggccctgtctccaccagcccagaacctgctgttgaagtcctacttctcagaggaggggattgagtacaacatcatccgggttcccatggctagctgtgacttctccattaggacctatacatacgctgacacccccgatgattttcagctccataatttcagtctccctgaagaagacaccaaatggaagatacctctgattcacagagccttgcaactgtcccaaaggccagtgagcctcttcgcttctccctggactagtcctacatggctgaagactaatggtgcttacaatgggaagggctccctgaaaggacagccaggtgacatatatcatcagacatgggcccgctactttgtgaaattccttgatgcctatgcagagcacgggctccaattctgggcagtcaccgcagaaaacgagccctcagctgggctgctgtctggctacccctttcagtgcttgggctttactcctgagcatcaacgggacttcattgcccgggatttggggccaacactggccaacagcacccaccacaatgtaagactcctcattctggatgaccagaggctgctgctccctcattgggccaaggtggtgttgacaaacccagaagctgccaaatatgttcatggcatcgctgtccactggtacctggattttttggcccctgccaagtggactctgggagagacccacagactcttccccaataccacactgtttgcatcagaagcctgcgtggggagcaaattctgggagcagtctgttaggctgggttcctgggatcggggcatgcaatattcccatagtataatagagaacctcctctaccacgtggtaggatggacagactggaatctggctttgaacccagaaggaggccccaattgggtgcgcaactttgttgacagccccatcattgtggatatcacaaaggacaccttctacaaacagcctatgttctatcatctggggcactttagcaagttcattccagagggttccactagagtaggcttggttgcctcacagaagaatgatctggatgctgtggcactcctgcatcctgacgggagtgcagtggtggtagtactgaacaggtctagcaaagatgttcccttgactatcaaagacccagctgtgggctttctggaaaccatttcccctggatactctatccacacctatctctggagaagacag

SEQ ID NO: 1150 - protein, 536 aa, synthetic construct
  REGION 1..536: note = Variant of B-Glucocerebrosidase
MEFSSPSREECPKPLSRVSIMAGSLTGLLLLQAVSWASGARPCIPKSFGYSSVVCVCNATYCDSVDPLTLPALGTFSRYESTRSGRRMELSMGPIQANRTGTGLLLTLQPEQKFQKVKGFGGAMTDAAALNILALSPPAQNLLLKSYFSEEGIEYNIIRVPMASCDFSIRTYTYADTPDDFQLHNFSLPEEDTKWKIPLIHRALQLSQRPVSLFASPWTSPTWLKTNGAYNGKGSLKGQPGDIYHQTWARYFVKFLDAYAEHGLQFWAVTAENEPSAGLLSGYPFQCLGFTPEHQRDFIARDLGPTLANSTHHNVRLLILDDQRLLLPHWAKVVLTNPEAAKYVHGIAVHWYLDFLAPAKWTLGETHRLFPNTTLFASEACVGSKFWEQSVRLGSWDRGMQYSHSIIENLLYHVVGWTDWNLALNPEGGPNWVRNFVDSPIIVDITKDTFYKQPMFYHLGHFSKFIPEGSTRVGLVASQKNDLDAVALLHPDGSAVVVVLNRSSKDVPLTIKDPAVGFLETISPGYSIHTYLWRRQ

SEQ ID NO: 1151 - DNA, 1608 bp, synthetic construct
  misc_feature 1..1608: note = Variant of B-Glucocerebrosidase
  source 1..1608: mol_type = other DNA
atggagttttcttctcctagtagagaagaatgccccaagccactgagcagggtgagcatcatggctggatccctcacagggctgcttcttttgcaggcagtctcatgggcctctggagccaggccctgtattcccaagtcattcggctactcctcagtggtgtgtgtatgcaatgccacctattgtgacagtgtcgatcctctcactctccctgctctgggtaccttctcccggtatgagagcacaagaagtggaagacgcatggagctctcaatgggccctatacaggctaaccgcactgggacaggtctgctgctgaccctccaacctgaacagaagtttcagaaagtcaagggatttggaggagccatgactgatgcagcagcactcaacatcttggccctgtctccaccagcccagaacctgctgttgaagtcctacttctcagaggaggggattgagtacaacatcatccgggttcccatggctagctgtgacttctccattaggacctatacatacgctgacacccccgatgattttcagctccataatttcagtctccctgaagaagacaccaaatggaagatacctctgattcacagagccttgcaactgtcccaaaggccagtgagcctcttcgcttctccctggactagtcctacatggctgaagactaatggtgcttacaatgggaagggctccctgaaaggacagccaggtgacatatatcatcagacatgggcccgctactttgtgaaattccttgatgcctatgcagagcacgggctccaattctgggcagtcaccgcagaaaacgagccctcagctgggctgctgtctggctacccctttcagtgcttgggctttactcctgagcatcaacgggacttcattgcccgggatttggggccaacactggccaacagcacccaccacaatgtaagactcctcattctggatgaccagaggctgctgctccctcattgggccaaggtggtgttgacaaacccagaagctgccaaatatgttcatggcatcgctgtccactggtacctggattttttggcccctgccaagtggactctgggagagacccacagactcttccccaataccacactgtttgcatcagaagcctgcgtggggagcaaattctgggagcagtctgttaggctgggttcctgggatcggggcatgcaatattcccatagtataataactaacctcctctaccacgtggtaggatggacagactggaatctggctttgaacccagaaggaggccccaattgggtgcgcaactttgttgacagccccatcattgtggatatcacaaaggacaccttctacaaacagcctatgttctatcatctggggcactttagcaagttcattccagagggttccactagagtaggcttggttgcctcacagaagaatgatctggatgctgtggcactcctgcatcctgacgggagtgcagtggtggtagtactgaacaagtctagcaaagatgttcccttgactatcaaagacccagctgtgggctttctggaaaccatttcccctggatactctatccacacctatctctggagaagacag

SEQ ID NO: 1152 - protein, 536 aa, synthetic construct
  REGION 1..536: note = Variant of B-Glucocerebrosidase
MEFSSPSREECPKPLSRVSIMAGSLTGLLLLQAVSWASGARPCIPKSFGYSSVVCVCNATYCDSVDPLTLPALGTFSRYESTRSGRRMELSMGPIQANRTGTGLLLTLQPEQKFQKVKGFGGAMTDAAALNILALSPPAQNLLLKSYFSEEGIEYNIIRVPMASCDFSIRTYTYADTPDDFQLHNFSLPEEDTKWKIPLIHRALQLSQRPVSLFASPWTSPTWLKTNGAYNGKGSLKGQPGDIYHQTWARYFVKFLDAYAEHGLQFWAVTAENEPSAGLLSGYPFQCLGFTPEHQRDFIARDLGPTLANSTHHNVRLLILDDQRLLLPHWAKVVLTNPEAAKYVHGIAVHWYLDFLAPAKWTLGETHRLFPNTTLFASEACVGSKFWEQSVRLGSWDRGMQYSHSIITNLLYHVVGWTDWNLALNPEGGPNWVRNFVDSPIIVDITKDTFYKQPMFYHLGHFSKFIPEGSTRVGLVASQKNDLDAVALLHPDGSAVVVVLNKSSKDVPLTIKDPAVGFLETISPGYSIHTYLWRRQ

SEQ ID NO: 1153 - DNA, 1608 bp, synthetic construct
  misc_feature 1..1608: note = Variant of B-Glucocerebrosidase
  source 1..1608: mol_type = other DNA
atggagttttcttctcctagtagagaagaatgccccaagccactgagcagggtgagcatcatggctggatccctcacagggctgattcttttgcaggcagtctcatgggcctctggagccaggccctgtattcccaagtcattcggctactcctcagtggtgtgtgtatgcaatgccacctattgtgacagtgtcgatcctctcactctccctgctctgggtaccttctcccggtatgagagcacaagaagtggaagacgcatggagctctcaatgggccctatacaggctaaccgcactgggacaggtctgctgctgaccctccaacctgaacagaagtttcagaaagtcaagggatttggaggagccatgactgatgcagcagcactcaacatcttggccctgtctccaccagcccagaacctgctgttgaagtcctacttctcagaggaggggattgagtacaacatcatccgggttcccatggctagctgtgacttctccattaggacctatacatacgctgacacccccgatgattttcagctccataatttcagtctccctgaagaagacaccaaatggaagatacctctgattcacagagccttgcaactgtcccaaaggccagtgagcctcttcgcttctccctggactagtcctacatggctgaagactaatggtgcttacaatgggaagggctccctgaaaggacagccaggtgacatatatcatcagacatgggcccgctactttgtgaaattccttgatgcctatgcagagcacgggctccaattctgggcagtcaccgcagaaaacgagccctcagctgggctgctgtctggctacccctttcagtgcttgggctttactcctgagcatcaacgggacttcattgcccgggatttggggccaacactggccaacagcacccaccacaatgtaagactcctcattctggatgaccagaggctgctgctccctcattgggccaaggtggtgttgacaaacccagaagctgccaaatatgttcatggcatcgctgtccactggtacctggattttttggcccctgccaagtggactctgggagagacccacagactcttccccaataccacactgtttgcatcagaagcctgcgtggggagcaaattctgggagcagtctgttaggctgggttcctgggatcggggcatgcaatattcccatagtataataactaacctcctctaccacgtggtaggatggacagactggaatctggctttgaacccagaaggaggccccaattgggtgcgcaactttgttgacagccccatcattgtggatatcacaaaggacaccttctacaaacagcctatgttctatcatctggggcactttagcaagttcattccagagggttccactagagtaggcttggttgcctcacagaagaatgatctggatgctgtggcactcctgcatcctgacgggagtgcagtggtggtagtactgaacaggtctagcaaagatgttcccttgactatcaaagacccagctgtgggctttctggaaaccatttcccctggatactctatccacacctatctctggaagagacag

SEQ ID NO: 1154 - protein, 536 aa, synthetic construct
  REGION 1..536: note = Variant of B-Glucocerebrosidase
MEFSSPSREECPKPLSRVSIMAGSLTGLILLQAVSWASGARPCIPKSFGYSSVVCVCNATYCDSVDPLTLPALGTFSRYESTRSGRRMELSMGPIQANRTGTGLLLTLQPEQKFQKVKGFGGAMTDAAALNILALSPPAQNLLLKSYFSEEGIEYNIIRVPMASCDFSIRTYTYADTPDDFQLHNFSLPEEDTKWKIPLIHRALQLSQRPVSLFASPWTSPTWLKTNGAYNGKGSLKGQPGDIYHQTWARYFVKFLDAYAEHGLQFWAVTAENEPSAGLLSGYPFQCLGFTPEHQRDFIARDLGPTLANSTHHNVRLLILDDQRLLLPHWAKVVLTNPEAAKYVHGIAVHWYLDFLAPAKWTLGETHRLFPNTTLFASEACVGSKFWEQSVRLGSWDRGMQYSHSIITNLLYHVVGWTDWNLALNPEGGPNWVRNFVDSPIIVDITKDTFYKQPMFYHLGHFSKFIPEGSTRVGLVASQKNDLDAVALLHPDGSAVVVVLNRSSKDVPLTIKDPAVGFLETISPGYSIHTYLWKRQ

SEQ ID NO: 1155 - DNA, 1608 bp, synthetic construct
  misc_feature 1..1608: note = Variant of B-Glucocerebrosidase
  source 1..1608: mol_type = other DNA
atggagttttcttctcctagtagagaagaatgccccaagccactgagcagggtgagcatcatggctggatccctcacagggctgcttcttttgcaggcagtctcatgggcctctggagccaggccctgtattcccaagtcattcggctactcctcagtggtgtgtgtatgcaatgccacctattgtgacagtgtcgatcctctcactctccctgctctgggtaccttctcccggtatgagagcacaagaagtggaagacgcatggagctctcaatgggccctatacaggctaaccgcactgggacaggtctgctgctgaccctccaacctgaacagaagtttcagaaagtcaagggatttggaggagccatgactgatgcagcagcactcaacatcttggccctgtctccaccagcccagaacctgctgttgaagtcctacttctcagaggaggggattgagtacaacatcatccgggttcccatggctagctgtgacttctccattaggacctatacatacgctgacacccccgatgattttcagctccataatttcagtctccctgaagaagacaccaaatggaagatacctctgattcacagagccttgcaactgtcccaaaggccagtgagcctcttcgcttctccctggactagtcctacatggctgaagactaatggtgcttacaatgggaagggctccctgaaaggacagccaggtgacatatatcatcagacatgggcccgctactttgtgaaattccttgatgcctatgcagagcacgggctccaattctgggcagtcaccgcagaaaacgagccctcagctgggctgctgtctggctacccctttcagtgcttgggctttactcctgagcatcaacgggacttcattgcccgggatttggggccaacactggccaacagcacccaccacaatgtaagactcctcattctggatgaccagaggctgctgctccctcattgggccaaggtggtgttgacaaacccagaagctgccaaatatgttcatggcatcgctgtccactggtacctggattttttggcccctgccaagtggactctgggagagacccacagactcttccccaataccacactgtttgcatcagaagcctgcgtggggagcaaattctgggagcagtctgttaggctgggttcctgggatcggggcatgcaatattcccatagtataataactaacctcctctaccacgtggtaggatggacagactggaatctggctttgaacccagaaggaggccccaattgggtgcgcaactttgttgacagccccatcattgtggatatcacaaaggacaccttctacaaacagcctatgttctatcatctggggcactttagcaagttcattccagagggttccactagagtaggcttggttgcctcacagaagaatgatctggatgctgtggcactcctgcatcctgacgggagtgcagtggtggtagtactgaaccagtctagcaaagatgttcccttgactatcaaagacccagctgtgggctttctggaaaccatttcccctggatactctatccacacctatctctggagaagacag

SEQ ID NO: 1156 - protein, 536 aa, synthetic construct
  REGION 1..536: note = Variant of B-Glucocerebrosidase
MEFSSPSREECPKPLSRVSIMAGSLTGLLLLQAVSWASGARPCIPKSFGYSSVVCVCNATYCDSVDPLTLPALGTFSRYESTRSGRRMELSMGPIQANRTGTGLLLTLQPEQKFQKVKGFGGAMTDAAALNILALSPPAQNLLLKSYFSEEGIEYNIIRVPMASCDFSIRTYTYADTPDDFQLHNFSLPEEDTKWKIPLIHRALQLSQRPVSLFASPWTSPTWLKTNGAYNGKGSLKGQPGDIYHQTWARYFVKFLDAYAEHGLQFWAVTAENEPSAGLLSGYPFQCLGFTPEHQRDFIARDLGPTLANSTHHNVRLLILDDQRLLLPHWAKVVLTNPEAAKYVHGIAVHWYLDFLAPAKWTLGETHRLFPNTTLFASEACVGSKFWEQSVRLGSWDRGMQYSHSIITNLLYHVVGWTDWNLALNPEGGPNWVRNFVDSPIIVDITKDTFYKQPMFYHLGHFSKFIPEGSTRVGLVASQKNDLDAVALLHPDGSAVVVVLNQSSKDVPLTIKDPAVGFLETISPGYSIHTYLWRRQ

SEQ ID NO: 1157 - DNA, 1608 bp, synthetic construct
  misc_feature 1..1608: note = Variant of B-Glucocerebrosidase
  source 1..1608: mol_type = other DNA
atggagttttcttctcctagtagagaagaatgccccaagccactgagcagggtgagcatcatggctggatccctcacagggctgcttcttttgcaggcagtctcatgggcctctggagccaggccctgtattcccaagtcattcggctactcctcagtggtgtgtgtatgcaatgccacctattgtgacagtgtcgatcctctcactctccctgctctgggtaccttctcccggtatgagagcacaagaagtggaagacgcatggagctctcaatgggccctatacaggctaaccgcactgggacaggtctgctgctgaccctccaacctgaacagaagtttcagaaagtcaagggatttggaggagccatgactgatgcagcagcactcaacatcttggccctgtctccaccagcccagaacctgctgttgaagtcctacttctcagaggaggggattgagtacaacatcatccgggttcccatggctagctgtgacttctccattaggacctatacatacgctgacacccccgatgattttcagctccataatttcagtctccctgaagaagacaccaaatggaagatacctctgattcacagagccttgcaactgtcccaaaggccagtgagcctcttcgcttctccctggactagtcctacatggctgaagactaatggtgcttacaatgggaagggctccctgaaaggacagccaggtgacatatatcatcagacatgggcccgctactttgtgaaattccttgatgcctatgcagagcacgggctccaattctgggcagtcaccgcagaaaacgagccctcagctgggctgctgtctggctacccctttcagtgcttgggctttactcctgagcatcaacgggacttcattgcccgggatttggggccaacactggccaacagcacccaccacaatgtaagactcctcattctggatgaccagaggctgctgctccctcattgggccaaggtggtgttgacaaacccagaagctgccaaatatgttcatggcatcgctgtccactggtacctggattttttggcccctgccaagtggactctgggagagacccacagactcttccccaataccacactgtttgcatcagaagcctgcgtggggagcaaattctgggagcagtctgttaggctgggttcctgggatcggggcatgcaatattcccatagtataataactaacctcctctaccacgtggtaggatggacagactggaatctggctttgaacccagaaggaggccccaattgggtgcgcaactttgttgacagccccatcattgtggatatcacaaaggacaccttctacaaacagcctatgttctatcatctggggcactttagcaagttcattccagagggttccactagagtaggcttggttgcctcacagaagaatgatctggatgctgtggcactcctgcatcctgacgggagtgcagtggctgtagtactgaacaggtctagcaaagatgttcccttgactatcaaagacccagctgtgggctttctggaaaccatttcccctggatactctatccacacctatctctggagaagacag

SEQ ID NO: 1158 - protein, 536 aa, synthetic construct
  REGION 1..536: note = Variant of B-Glucocerebrosidase
MEFSSPSREECPKPLSRVSIMAGSLTGLLLLQAVSWASGARPCIPKSFGYSSVVCVCNATYCDSVDPLTLPALGTFSRYESTRSGRRMELSMGPIQANRTGTGLLLTLQPEQKFQKVKGFGGAMTDAAALNILALSPPAQNLLLKSYFSEEGIEYNIIRVPMASCDFSIRTYTYADTPDDFQLHNFSLPEEDTKWKIPLIHRALQLSQRPVSLFASPWTSPTWLKTNGAYNGKGSLKGQPGDIYHQTWARYFVKFLDAYAEHGLQFWAVTAENEPSAGLLSGYPFQCLGFTPEHQRDFIARDLGPTLANSTHHNVRLLILDDQRLLLPHWAKVVLTNPEAAKYVHGIAVHWYLDFLAPAKWTLGETHRLFPNTTLFASEACVGSKFWEQSVRLGSWDRGMQYSHSIITNLLYHVVGWTDWNLALNPEGGPNWVRNFVDSPIIVDITKDTFYKQPMFYHLGHFSKFIPEGSTRVGLVASQKNDLDAVALLHPDGSAVAVVLNRSSKDVPLTIKDPAVGFLETISPGYSIHTYLWRRQ

SEQ ID NO: 1159 - DNA, 1608 bp, synthetic construct
  misc_feature 1..1608: note = Variant of B-Glucocerebrosidase
  source 1..1608: mol_type = other DNA
atggagttttcttctcctagtagagaagaatgccccaagccactgagcagggtgagcatcatggctggatccctcacagggctgcttcttttgcaggcagtctcatgggcctctggagccaggccctgtattcccaagtcattcggctactcctcagtggtgtgtgtatgcaatgccacctattgtgacagtgtcgatcctctcactctccctgctctgggtaccttctcccggtatgagagcacaagaagtggaagacgcatggagctctcaatgggccctatacaggctaaccgcactgggacaggtctgctgctgaccctccaacctgaacagaagtttcagaaagtcaagggatttggaggagccatgactgatgcagcagcactcaacatcttggccctgtctccaccagcccagaacctgctgttgaagtcctacttctcagaggaggggattgagtacaacatcatccgggttcccatggctagctgtgacttctccattaggacctatacatacgctgacacccccgatgattttcagctccataatttcagtctccctgaagaagacaccaaatggaagatacctctgattcacagagccttgcaactgtcccaaaggccagtgagcctcttcgcttctccctggactagtcctacatggctgaagactaatggtgcttacaatgggaagggctccctgaaaggacagccaggtgacatatatcatcagacatgggcccgctactttgtgaaattccttgatgcctatgcagagcacgggctccaattctgggcagtcaccgcagaaaacgagccctcagctgggctgctgtctggctacccctttcagtgcttgggctttactcctgagcatcaacgggacttcattgcccgggatttggggccaacactggccaacagcacccaccacaatgtaagactcctcattctggatgaccagaggctgctgctccctcattgggccaaggtggtgttgacaaacccagaagctgccaaatatgttcatggcatcgctgtccactggtacctggattttttggcccctgccaagtggactctgggagagacccacagactcttccccaataccacactgtttgcatcagaagcctgcgtggggagcaaattctgggagcagtctgttaggctgggttcctgggatcggggcatgcaatattcccatagtataataactaacctcctctaccacgtggtaggatggacagactggaatctggctttgaacccagaaggaggccccaattgggtgcgcaactttgttgacagccccatcattgtggatatcacaaaggacaccttctacaaacagcctatgttctatcatctggggcactttagcaagttcattccagagggttccactagagtaggcttggttgcctcacagaagaatgatctggattcagtggcactcctgcatcctgacgggagtgcagtggtggtagtactgaacaggtctagcaaagatgttcccttgactatcaaagacccagctgtgggctttctggaaaccatttcccctggatactctatccacacctatctctggagaagacag

SEQ ID NO: 1160 - protein, 536 aa, synthetic construct
  REGION 1..536: note = Variant of B-Glucocerebrosidase
MEFSSPSREECPKPLSRVSIMAGSLTGLLLLQAVSWASGARPCIPKSFGYSSVVCVCNATYCDSVDPLTLPALGTFSRYESTRSGRRMELSMGPIQANRTGTGLLLTLQPEQKFQKVKGFGGAMTDAAALNILALSPPAQNLLLKSYFSEEGIEYNIIRVPMASCDFSIRTYTYADTPDDFQLHNFSLPEEDTKWKIPLIHRALQLSQRPVSLFASPWTSPTWLKTNGAYNGKGSLKGQPGDIYHQTWARYFVKFLDAYAEHGLQFWAVTAENEPSAGLLSGYPFQCLGFTPEHQRDFIARDLGPTLANSTHHNVRLLILDDQRLLLPHWAKVVLTNPEAAKYVHGIAVHWYLDFLAPAKWTLGETHRLFPNTTLFASEACVGSKFWEQSVRLGSWDRGMQYSHSIITNLLYHVVGWTDWNLALNPEGGPNWVRNFVDSPIIVDITKDTFYKQPMFYHLGHFSKFIPEGSTRVGLVASQKNDLDSVALLHPDGSAVVVVLNRSSKDVPLTIKDPAVGFLETISPGYSIHTYLWRRQ

SEQ ID NO: 1161 - DNA, 1608 bp, synthetic construct
  misc_feature 1..1608: note = Variant of B-Glucocerebrosidase
  source 1..1608: mol_type = other DNA
atggagttttcttctcctagtagagaagaatgccccaagccactgagcagggtgagcatcatggctggatccctcacagggctgcttcttttgcaggcagtctcatgggcctctggagccaggccctgtattcccaagtcattcggctactcctcagtggtgtgtgtatgcaatgccacctattgtgacagtgtcgatcctctcactctccctgctctgggtaccttctcccggtatgagagcacaagaagtggaagacgcatggagctctcaatgggccctatacaggctaaccgcactgggacaggtctgctgctgaccctccaacctgaacagaagtttcagaaagtcaagggatttggaggagccatgactgatgcagcagcactcaacatcttggccctgtctccaccagcccagaacctgctgttgaagtcctacttctcagaggaggggattgagtacaacatcatccgggttcccatggctagctgtgacttctccattaggacctatacatacgctgacacccccgatgattttcagctccataatttcagtctccctgaagaagacaccaaatggaagatacctctgattcacagagccttgcaactgtcccaaaggccagtgagcctcttcgcttctccctggactagtcctacatggctgaagactaatggtgcttacaatgggaagggctccctgaaaggacagccaggtgacatatatcatcagacatgggcccgctactttgtgaaattccttgatgcctatgcagagcacgggctccaattctgggcagtcaccgcagaaaacgagccctcagctgggctgctgtctggctacccctttcagtgcttgggctttactcctgagcatcaacgggacttcattgcccgggatttggggccaacactggccaacagcacccaccacaatgtaagactcctcattctggatgaccagaggctgctgctccctcattgggccaaggtggtgttgacaaacccagaagctgccaaatatgttcatggcatcgctgtccactggtacctggattttttggcccctgccaagtggactctgggagagacccacagactcttccccaataccacactgtttgcatcagaagcctgcgtggggagcaaattctgggagcagtctgttaggctgggttcctgggatcggggcatgcaatattcccatagtataataactaacctcctctaccacgtggtaggatggacagactggaatctggctttgaacccagaaggaggccccaattgggtgcgcaactttgttgacagccccatcattgtggatatcacaaaggacaccttctacaaacagcctatgttctatcatctggggcactttagcaagttcattccagagggttccactagagtaggcttggttgcctcacagaagaatgatctggatgctgtggcactcctgcatcctgacgggagtgcagtggtggtagtactgaacaggtctagcaaagatgttcccttgactatcaaagacccagctgtgggctttctggaaaccatttcccctggatactctatccacacctatctctatagaagacag

SEQ ID NO: 1162 - protein, 536 aa, synthetic construct
  REGION 1..536: note = Variant of B-Glucocerebrosidase
MEFSSPSREECPKPLSRVSIMAGSLTGLLLLQAVSWASGARPCIPKSFGYSSVVCVCNATYCDSVDPLTLPALGTFSRYESTRSGRRMELSMGPIQANRTGTGLLLTLQPEQKFQKVKGFGGAMTDAAALNILALSPPAQNLLLKSYFSEEGIEYNIIRVPMASCDFSIRTYTYADTPDDFQLHNFSLPEEDTKWKIPLIHRALQLSQRPVSLFASPWTSPTWLKTNGAYNGKGSLKGQPGDIYHQTWARYFVKFLDAYAEHGLQFWAVTAENEPSAGLLSGYPFQCLGFTPEHQRDFIARDLGPTLANSTHHNVRLLILDDQRLLLPHWAKVVLTNPEAAKYVHGIAVHWYLDFLAPAKWTLGETHRLFPNTTLFASEACVGSKFWEQSVRLGSWDRGMQYSHSIITNLLYHVVGWTDWNLALNPEGGPNWVRNFVDSPIIVDITKDTFYKQPMFYHLGHFSKFIPEGSTRVGLVASQKNDLDAVALLHPDGSAVVVVLNRSSKDVPLTIKDPAVGFLETISPGYSIHTYLYRRQ

SEQ ID NO: 1163 - DNA, 1608 bp, synthetic construct
  misc_feature 1..1608: note = Variant of B-Glucocerebrosidase
  source 1..1608: mol_type = other DNA
atggagttttcttctcctagtagagaagaatgccccaagccactgagcagggtgagcatcatggctggatccctcacagggctgcttcttttgcaggcagtctcatgggcctctggagccaggccctgtattcccaagtcattcggctactcctcagtggtgtgtgtatgcaatgccacctattgtgacagtgtcgatcctctcactctccctgctctgggtaccttctcccggtatgagagcacaagaagtggaagacgcatggagctctcaatgggccctatacaggctaaccgcactgggacaggtctgctgctgaccctccaacctgaacagaagtttcagaaagtcaagggatttggaggagccatgactgatgcagcagcactcaacatcttggccctgtctccaccagcccagaacctgctgttgaagtcctacttctcagaggaggggattgagtacaacatcatccgggttcccatggctagctgtgacttctccattaggacctatacatacgctgacacccccgatgattttcagctccataatttcagtctccctgaagaagacaccaaatggaagatacctctgattcacagagccttgcaactgtcccaaaggccagtgagcctcttcgcttctccctggactagtcctacatggctgaagactaatggtgcttacaatgggaagggctccctgaaaggacagccaggtgacatatatcatcagacatgggcccgctactttgtgaaattccttgatgcctatgcagagcacgggctccaattctgggcagtcaccgcagaaaacgagccctcagctgggctgctgtctggctacccctttcagtgcttgggctttactcctgagcatcaacgggacttcattgcccgggatttggggccaacactggccaacagcacccaccacaatgtaagactcctcattctggatgaccagaggctgctgctccctcattgggccaaggtggtgttgacaaacccagaagctgccaaatatgttcatggcatcgctgtccactggtacctggattttttggcccctgccaagtggactctgggagagacccacagactcttccccaataccacactgtttgcatcagaagcctgcgtggggagcaaattctgggagcagtctgttaggctgggttcctgggatcggggcatgcaatattcccatagtataataactaacctcctctaccacgtggtaggatggacagactggaatctggctttgaacccagaaggaggccccaattgggtgcgcaactttgttgacagccccatcattgtggatatcacaaaggacaccttctacaaacagcctatgttctatcatctggggcactttagcaagttcattccagagggttccactagagtaggcttggttgcctcacagaagaatgatctggatgctgtggcactcctgcatcctgacgggagtagcgtggtggtagtactgaacaggtctagcaaagatgttcccttgactatcaaagacccagctgtgggctttctggaaaccatttcccctggatactctatccacacctatctctggagaagacag

SEQ ID NO: 1164 - protein, 536 aa, synthetic construct
  REGION 1..536: note = Variant of B-Glucocerebrosidase
MEFSSPSREECPKPLSRVSIMAGSLTGLLLLQAVSWASGARPCIPKSFGYSSVVCVCNATYCDSVDPLTLPALGTFSRYESTRSGRRMELSMGPIQANRTGTGLLLTLQPEQKFQKVKGFGGAMTDAAALNILALSPPAQNLLLKSYFSEEGIEYNIIRVPMASCDFSIRTYTYADTPDDFQLHNFSLPEEDTKWKIPLIHRALQLSQRPVSLFASPWTSPTWLKTNGAYNGKGSLKGQPGDIYHQTWARYFVKFLDAYAEHGLQFWAVTAENEPSAGLLSGYPFQCLGFTPEHQRDFIARDLGPTLANSTHHNVRLLILDDQRLLLPHWAKVVLTNPEAAKYVHGIAVHWYLDFLAPAKWTLGETHRLFPNTTLFASEACVGSKFWEQSVRLGSWDRGMQYSHSIITNLLYHVVGWTDWNLALNPEGGPNWVRNFVDSPIIVDITKDTFYKQPMFYHLGHFSKFIPEGSTRVGLVASQKNDLDAVALLHPDGSSVVVVLNRSSKDVPLTIKDPAVGFLETISPGYSIHTYLWRRQ

SEQ ID NO: 1165 - DNA, 1608 bp, synthetic construct
  misc_feature 1..1608: note = Variant of B-Glucocerebrosidase
  source 1..1608: mol_type = other DNA
atggagttttcttctcctagtagagaagaatgccccaagccactgagcagggtgagcatcatggctggatccctcacagggctgcttcttttgcaggcagtctcatgggcctctggagccaggccctgtattcccaagtcattcggctactcctcagtggtgtgtgtatgcaatgccacctattgtgacagtgtcgatcctctcactctccctgctctgggtaccttctcccggtatgagagcacaagaagtggaagacgcatggagctctcaatgggccctatacaggctaaccgcactgggacaggtctgctgctgaccctccaacctgaacagaagtttcagaaagtcaagggatttggaggagccatgactgatgcagcagcactcaacatcttggccctgtctccaccagcccagaacctgctgttgaagtcctacttctcagaggaggggattgagtacaacatcatccgggttcccatggctagctgtgacttctccattaggacctatacatacgctgacacccccgatgattttcagctccataatttcagtctccctgaagaagacaccaaatggaagatacctctgattcacagagccttgcaactgtcccaaaggccagtgagcctcttcgcttctccctggactagtcctacatggctgaagactaatggtgcttacaatgggaagggctccctgaaaggacagccaggtgacatatatcatcagacatgggcccgctactttgtgaaattccttgatgcctatgcagagcacgggctccaattctgggcagtcaccgcagaaaacgagccctcagctgggctgctgtctggctacccctttcagtgcttgggctttactcctgagcatcaacgggacttcattgcccgggatttggggccaacactggccaacagcacccaccacaatgtaagactcctcattctggatgaccagaggctgctgctccctcattgggccaaggtggtgttgacaaacccagaagctgccaaatatgttcatggcatcgctgtccactggtacctggattttttggcccctgccaagtggactctgggagagacccacagactcttccccaataccacactgtttgcatcagaagcctgcgtggggagcaaattctgggagcagtctgttaggctgggttcctgggatcggggcatgcaatattcccatagtataataactaacctcctctaccacgtggtaggatggacagactggaatctggctttgaacccagaaggaggccccaattgggtgcgcaactttgttgacagccccatcattgtggatatcacaaaggacaccttctacaaacagcctatgttctatcatctggggcactttagcaagttcattccagagggttccactagagtaggcttggttgcctcacagaagaatgatctggatgctgtggcactcctgcatcctgacgggagtgcagtggtggtagtactgaacaggtctagcaaagatgttcccttgactatcaaagacccagctgtgggctttctggaaaccatttcccctggatactctatccacacctatctctggagaagacct

SEQ ID NO: 1166 - protein, 536 aa, synthetic construct
  REGION 1..536: note = Variant of B-Glucocerebrosidase
MEFSSPSREECPKPLSRVSIMAGSLTGLLLLQAVSWASGARPCIPKSFGYSSVVCVCNATYCDSVDPLTLPALGTFSRYESTRSGRRMELSMGPIQANRTGTGLLLTLQPEQKFQKVKGFGGAMTDAAALNILALSPPAQNLLLKSYFSEEGIEYNIIRVPMASCDFSIRTYTYADTPDDFQLHNFSLPEEDTKWKIPLIHRALQLSQRPVSLFASPWTSPTWLKTNGAYNGKGSLKGQPGDIYHQTWARYFVKFLDAYAEHGLQFWAVTAENEPSAGLLSGYPFQCLGFTPEHQRDFIARDLGPTLANSTHHNVRLLILDDQRLLLPHWAKVVLTNPEAAKYVHGIAVHWYLDFLAPAKWTLGETHRLFPNTTLFASEACVGSKFWEQSVRLGSWDRGMQYSHSIITNLLYHVVGWTDWNLALNPEGGPNWVRNFVDSPIIVDITKDTFYKQPMFYHLGHFSKFIPEGSTRVGLVASQKNDLDAVALLHPDGSAVVVVLNRSSKDVPLTIKDPAVGFLETISPGYSIHTYLWRRP

SEQ ID NO: 1167 - DNA, 1608 bp, synthetic construct
  misc_feature 1..1608: note = Variant of B-Glucocerebrosidase
  source 1..1608: mol_type = other DNA
atggagttttcttctcctagtagagaagaatgccccaagccactgagcagggtgagcatcatggctggatccctcacagggctgcttcttttgcaggcagtctcatgggcctctggagccaggccctgtattcccaagtcattcggctactcctcagtggtgtgtgtatgcaatgccacctattgtgacagtgtcgatcctctcactctccctgctctgggtaccttctcccggtatgagagcacaagaagtggaagacgcatggagctctcaatgggccctatacaggctaaccgcactgggacaggtctgctgctgaccctccaacctgaacagaagtttcagaaagtcaagggatttggaggagccatgactgatgcagcagcactcaacatcttggccctgtctccaccagcccagaacctgctgttgaagtcctacttctcagaggaggggattgagtacaacatcatccgggttcccatggctagctgtgacttctccattaggacctatacatacgctgacacccccgatgattttcagctccataatttcagtctccctgaagaagacaccaaatggaagatacctctgattcacagagccttgcaactgtcccaaaggccagtgagcctcttcgcttctccctggactagtcctacatggctgaagactaatggtgcttacaatgggaagggctccctgaaaggacagccaggtgacatatatcatcagacatgggcccgctactttgtgaaattccttgatgcctatgcagagcacgggctccaattctgggcagtcaccgcagaaaacgagccctcagctgggctgctgtctggctacccctttcagtgcttgggctttactcctgagcatcaacgggacttcattgcccgggatttggggccaacactggccaacagcacccaccacaatgtaagactcctcattctggatgaccagaggctgctgctccctcattgggccaaggtggtgttgacaaacccagaagctgccaaatatgttcatggcatcgctgtccactggtacctggattttttggcccctgccaagtggactctgggagagacccacagactcttccccaataccacactgtttgcatcagaagcctgcgtggggagcaaattctgggagcagtctgttaggctgggttcctgggatcggggcatgcaatattcccatagtataataactaacctcctctaccacgtggtaggatggacagactggaatctggctttgaacccagaaggaggccccaattgggtgcgcaactttgttgacagccccatcattgtggatatcacaaaggacaccttctacaaacagcctatgttctatcatctggggcactttagcaagttcattccagagggttccactagagtaggcttggttgcctcacagaagaatgatctggatgctgtggcactcctgcatcctgacgggagtgcagtggtggtagtactgaacaggtctagcaaagatgttcccttgactatcaaagacccagctgtgggctttctggaaaccatttcccctggatactctatccacacctatctctggagaagacac

SEQ ID NO: 1168 - protein, 536 aa, synthetic construct
  REGION 1..536: note = Variant of B-Glucocerebrosidase
MEFSSPSREECPKPLSRVSIMAGSLTGLLLLQAVSWASGARPCIPKSFGYSSVVCVCNATYCDSVDPLTLPALGTFSRYESTRSGRRMELSMGPIQANRTGTGLLLTLQPEQKFQKVKGFGGAMTDAAALNILALSPPAQNLLLKSYFSEEGIEYNIIRVPMASCDFSIRTYTYADTPDDFQLHNFSLPEEDTKWKIPLIHRALQLSQRPVSLFASPWTSPTWLKTNGAYNGKGSLKGQPGDIYHQTWARYFVKFLDAYAEHGLQFWAVTAENEPSAGLLSGYPFQCLGFTPEHQRDFIARDLGPTLANSTHHNVRLLILDDQRLLLPHWAKVVLTNPEAAKYVHGIAVHWYLDFLAPAKWTLGETHRLFPNTTLFASEACVGSKFWEQSVRLGSWDRGMQYSHSIITNLLYHVVGWTDWNLALNPEGGPNWVRNFVDSPIIVDITKDTFYKQPMFYHLGHFSKFIPEGSTRVGLVASQKNDLDAVALLHPDGSAVVVVLNRSSKDVPLTIKDPAVGFLETISPGYSIHTYLWRRH

SEQ ID NO: 1169 - DNA, 1608 bp, synthetic construct
  misc_feature 1..1608: note = Variant of B-Glucocerebrosidase
  source 1..1608: mol_type = other DNA
atggagttttcttctcctagtagagaagaatgccccaagccactgagcagggtgagcatcatggctggatccctcacagggctgcttcttttgcaggcagtctcatgggcctctggagccaggccctgtattcccaagtcattcggctactcctcagtggtgtgtgtatgcaatgccacctattgtgacagtgtcgatcctctcactctccctgctctgggtaccttctcccggtatgagagcacaagaagtggaagacgcatggagctctcaatgggccctatacaggctaaccgcactgggacaggtctgctgctgaccctccaacctgaacagaagtttcagaaagtcaagggatttggaggagccatgactgatgcagcagcactcaacatcttggccctgtctccaccagcccagaacctgctgttgaagtcctacttctcagaggaggggattgagtacaacatcatccgggttcccatggctagctgtgacttctccattaggacctatacatacgctgacacccccgatgattttcagctccataatttcagtctccctgaagaagacaccaaatggaagatacctctgattcacagagccttgcaactgtcccaaaggccagtgagcctcttcgcttctccctggactagtcctacatggctgaagactaatggtgcttacaatgggaagggctccctgaaaggacagccaggtgacatatatcatcagacatgggcccgctactttgtgaaattccttgatgcctatgcagagcacgggctccaattctgggcagtcaccgcagaaaacgagccctcagctgggctgctgtctggctacccctttcagtgcttgggctttactcctgagcatcaacgggacttcattgcccgggatttggggccaacactggccaacagcacccaccacaatgtaagactcctcattctggatgaccagaggctgctgctccctcattgggccaaggtggtgttgacaaacccagaagctgccaaatatgttcatggcatcgctgtccactggtacctggattttttggcccctgccaagtggactctgggagagacccacagactcttccccaataccacactgtttgcatcagaagcctgcgtggggagcaaattctgggagcagtctgttaggctgggttcctgggatcggggcatgcaatattcccatagtataataactaacctcctctaccacgtggtaggatggacagactggaatctggctttgaacccagaaggaggccccaattgggtgcgcaactttgttgacagccccatcattgtggatatcacaaaggacaccttctacaaacagcctatgttctatcatctggggcactttagcaagttcattccagagggttccactagagtaggcttggttgcctcacagaagaatgatctggatatggtggcactcctgcatcctgacgggagtgcagtggtggtagtactgaacaggtctagcaaagatgttcccttgactatcaaagacccagctgtgggctttctggaaaccatttcccctggatactctatccacacctatctctggagaagacag

SEQ ID NO: 1170 - protein, 536 aa, synthetic construct
  REGION 1..536: note = Variant of B-Glucocerebrosidase
MEFSSPSREECPKPLSRVSIMAGSLTGLLLLQAVSWASGARPCIPKSFGYSSVVCVCNATYCDSVDPLTLPALGTFSRYESTRSGRRMELSMGPIQANRTGTGLLLTLQPEQKFQKVKGFGGAMTDAAALNILALSPPAQNLLLKSYFSEEGIEYNIIRVPMASCDFSIRTYTYADTPDDFQLHNFSLPEEDTKWKIPLIHRALQLSQRPVSLFASPWTSPTWLKTNGAYNGKGSLKGQPGDIYHQTWARYFVKFLDAYAEHGLQFWAVTAENEPSAGLLSGYPFQCLGFTPEHQRDFIARDLGPTLANSTHHNVRLLILDDQRLLLPHWAKVVLTNPEAAKYVHGIAVHWYLDFLAPAKWTLGETHRLFPNTTLFASEACVGSKFWEQSVRLGSWDRGMQYSHSIITNLLYHVVGWTDWNLALNPEGGPNWVRNFVDSPIIVDITKDTFYKQPMFYHLGHFSKFIPEGSTRVGLVASQKNDLDMVALLHPDGSAVVVVLNRSSKDVPLTIKDPAVGFLETISPGYSIHTYLWRRQ

SEQ ID NO: 1171 - DNA, 1608 bp, synthetic construct
  misc_feature 1..1608: note = Variant of B-Glucocerebrosidase
  source 1..1608: mol_type = other DNA
atggagttttcttctcctagtagagaagaatgccccaagccactgagcagggtgagcatcatggctggatccctcacagggctgcttcttttgcaggcagtctcatgggcctctggagccaggccctgtattcccaagtcattcggctactcctcagtggtgtgtgtatgcaatgccacctattgtgacagtgtcgatcctctcactctccctgctctgggtaccttctcccggtatgagagcacaagaagtggaagacgcatggagctctcaatgggccctatacaggctaaccgcactgggacaggtctgctgctgaccctccaacctgaacagaagtttcagaaagtcaagggatttggaggagccatgactgatgcagcagcactcaacatcttggccctgtctccaccagcccagaacctgctgttgaagtcctacttctcagaggaggggattgagtacaacatcatccgggttcccatggctagctgtgacttctccattaggacctatacatacgctgacacccccgatgattttcagctccataatttcagtctccctgaagaagacaccaaatggaagatacctctgattcacagagccttgcaactgtcccaaaggccagtgagcctcttcgcttctccctggactagtcctacatggctgaagactaatggtgcttacaatgggaagggctccctgaaaggacagccaggtgacatatatcatcagacatgggcccgctactttgtgaaattccttgatgcctatgcagagcacgggctccaattctgggcagtcaccgcagaaaacgagccctcagctgggctgctgtctggctacccctttcagtgcttgggctttactcctgagcatcaacgggacttcattgcccgggatttggggccaacactggccaacagcacccaccacaatgtaagactcctcattctggatgaccagaggctgctgctccctcattgggccaaggtggtgttgacaaacccagaagctgccaaatatgttcatggcatcgctgtccactggtacctggattttttggcccctgccaagtggactctgggagagacccacagactcttccccaataccacactgtttgcatcagaagcctgcgtggggagcaaattctgggagcagtctgttaggctgggttcctgggatcggggcatgcaatattcccatagtataataactaacctcctctaccacgtggtaggatggacagactggaatctggctttgaacccagaaggaggccccaattgggtgcgcaactttgttgacagccccatcattgtggatatcacaaaggacaccttctacaaacagcctatgttctatcatctggggcactttagcaagttcattccagagggttccactagagtaggcttggttgcctcacagaagaatgatctggatgctgtggcactcctgcatcctgacgggagtgcagtggtggtagtactgaacaggtctagcaaagatgttcccttgagcatcaaagacccagctgtgggctttctggaaaccatttcccctggatactctatccacacctatctctggagaagacag

SEQ ID NO: 1172 - protein, 536 aa, synthetic construct
  REGION 1..536: note = Variant of B-Glucocerebrosidase
MEFSSPSREECPKPLSRVSIMAGSLTGLLLLQAVSWASGARPCIPKSFGYSSVVCVCNATYCDSVDPLTLPALGTFSRYESTRSGRRMELSMGPIQANRTGTGLLLTLQPEQKFQKVKGFGGAMTDAAALNILALSPPAQNLLLKSYFSEEGIEYNIIRVPMASCDFSIRTYTYADTPDDFQLHNFSLPEEDTKWKIPLIHRALQLSQRPVSLFASPWTSPTWLKTNGAYNGKGSLKGQPGDIYHQTWARYFVKFLDAYAEHGLQFWAVTAENEPSAGLLSGYPFQCLGFTPEHQRDFIARDLGPTLANSTHHNVRLLILDDQRLLLPHWAKVVLTNPEAAKYVHGIAVHWYLDFLAPAKWTLGETHRLFPNTTLFASEACVGSKFWEQSVRLGSWDRGMQYSHSIITNLLYHVVGWTDWNLALNPEGGPNWVRNFVDSPIIVDITKDTFYKQPMFYHLGHFSKFIPEGSTRVGLVASQKNDLDAVALLHPDGSAVVVVLNRSSKDVPLSIKDPAVGFLETISPGYSIHTYLWRRQ

SEQ ID NO: 1173 - DNA, 1608 bp, synthetic construct
  misc_feature 1..1608: note = Variant of B-Glucocerebrosidase
  source 1..1608: mol_type = other DNA
atggagttttcttctcctagtagagaagaatgccccaagccactgagcagggtgagcatcatggctggatccctcacagggctgcttcttttgcaggcagtctcatgggcctctggagccaggccctgtattcccaagtcattcggctactcctcagtggtgtgtgtatgcaatgccacctattgtgacagtgtcgatcctctcactctccctgctctgggtaccttctcccggtatgagagcacaagaagtggaagacgcatggagctctcaatgggccctatacaggctaaccgcactgggacaggtctgctgctgaccctccaacctgaacagaagtttcagaaagtcaagggatttggaggagccatgactgatgcagcagcactcaacatcttggccctgtctccaccagcccagaacctgctgttgaagtcctacttctcagaggaggggattgagtacaacatcatccgggttcccatggctagctgtgacttctccattaggacctatacatacgctgacacccccgatgattttcagctccataatttcagtctccctgaagaagacaccaaatggaagatacctctgattcacagagccttgcaactgtcccaaaggccagtgagcctcttcgcttctccctggactagtcctacatggctgaagactaatggtgcttacaatgggaagggctccctgaaaggacagccaggtgacatatatcatcagacatgggcccgctactttgtgaaattccttgatgcctatgcagagcacgggctccaattctgggcagtcaccgcagaaaacgagccctcagctgggctgctgtctggctacccctttcagtgcttgggctttactcctgagcatcaacgggacttcattgcccgggatttggggccaacactggccaacagcacccaccacaatgtaagactcctcattctggatgaccagaggctgctgctccctcattgggccaaggtggtgttgacaaacccagaagctgccaaatatgttcatggcatcgctgtccactggtacctggattttttggcccctgccaagtggactctgggagagacccacagactcttccccaataccacactgtttgcatcagaagcctgcgtggggagcaaattctgggagcagtctgttaggctgggttcctgggatcggggcatgcaatattcccatagtataataactaacctcctctaccacgtggtaggatggacagactggaatctggctttgaacccagaaggaggccccaattgggtgcgcaactttgttgacagccccatcattgtggatatcacaaaggacaccttctacaaacagcctatgttctatcatctggggcactttagcaagttcattccagagggttccactagagtaggcttggttgcctcacagaagaatgatctggatacagtggcactcctgcatcctgacgggagtgcagtggtggtagtactgaacaggtctagcaaagatgttcccttgactatcaaagacccagctgtgggctttctggaaaccatttcccctggatactctatccacacctatctctggagaagacag

SEQ ID NO: 1174 - protein, 536 aa, synthetic construct
  REGION 1..536: note = Variant of B-Glucocerebrosidase
MEFSSPSREECPKPLSRVSIMAGSLTGLLLLQAVSWASGARPCIPKSFGYSSVVCVCNATYCDSVDPLTLPALGTFSRYESTRSGRRMELSMGPIQANRTGTGLLLTLQPEQKFQKVKGFGGAMTDAAALNILALSPPAQNLLLKSYFSEEGIEYNIIRVPMASCDFSIRTYTYADTPDDFQLHNFSLPEEDTKWKIPLIHRALQLSQRPVSLFASPWTSPTWLKTNGAYNGKGSLKGQPGDIYHQTWARYFVKFLDAYAEHGLQFWAVTAENEPSAGLLSGYPFQCLGFTPEHQRDFIARDLGPTLANSTHHNVRLLILDDQRLLLPHWAKVVLTNPEAAKYVHGIAVHWYLDFLAPAKWTLGETHRLFPNTTLFASEACVGSKFWEQSVRLGSWDRGMQYSHSIITNLLYHVVGWTDWNLALNPEGGPNWVRNFVDSPIIVDITKDTFYKQPMFYHLGHFSKFIPEGSTRVGLVASQKNDLDTVALLHPDGSAVVVVLNRSSKDVPLTIKDPAVGFLETISPGYSIHTYLWRRQ

SEQ ID NO: 1175 - DNA, 1608 bp, synthetic construct
  misc_feature 1..1608: note = Variant of B-Glucocerebrosidase
  source 1..1608: mol_type = other DNA
atggagttttcttctcctagtagagaagaatgccccaagccactgagcagggtgagcatcatggctggatccctcacagggctgcttcttttgcaggcagtctcatgggcctctggagccaggccctgtattcccaagtcattcggctactcctcagtggtgtgtgtatgcaatgccacctattgtgacagtgtcgatcctctcactctccctgctctgggtaccttctcccggtatgagagcacaagaagtggaagacgcatggagctctcaatgggccctatacaggctaaccgcactgggacaggtctgctgctgaccctccaacctgaacagaagtttcagaaagtcaagggatttggaggagccatgactgatgcagcagcactcaacatcttggccctgtctccaccagcccagaacctgctgttgaagtcctacttctcagaggaggggattgagtacaacatcatccgggttcccatggctagctgtgacttctccattaggacctatacatacgctgacacccccgatgattttcagctccataatttcagtctccctgaagaagacaccaaatggaagatacctctgattcacagagccttgcaactgtcccaaaggccagtgagcctcttcgcttctccctggactagtcctacatggctgaagactaatggtgcttacaatgggaagggctccctgaaaggacagccaggtgacatatatcatcagacatgggcccgctactttgtgaaattccttgatgcctatgcagagcacgggctccaattctgggcagtcaccgcagaaaacgagccctcagctgggctgctgtctggctacccctttcagtgcttgggctttactcctgagcatcaacgggacttcattgcccgggatttggggccaacactggccaacagcacccaccacaatgtaagactcctcattctggatgaccagaggctgctgctccctcattgggccaaggtggtgttgacaaacccagaagctgccaaatatgttcatggcatcgctgtccactggtacctggattttttggcccctgccaagtggactctgggagagacccacagactcttccccaataccacactgtttgcatcagaagcctgcgtggggagcaaattctgggagcagtctgttaggctgggttcctgggatcggggcatgcaatattcccatagtataataactaacctcctctaccacgtggtaggatggacagactggaatctggctttgaacccagaaggaggccccaattgggtgcgcaactttgttgacagccccatcattgtggatatcacaaaggacaccttctacaaacagcctatgttctatcatctggggcactttagcaagttcattccagagggttccactagagtaggcttggttgcctcacagaagaatgatctggatgctgtggcactcctgcatcctgacgggagtgcagtggtggtagtactgaacaggtctagcaaagatgttcccttgactatcaaagacccagctgtgggctttctggaaaccatttcccctggatactctatccacacctatgtgtggagaagacag

SEQ ID NO: 1176 - protein, 536 aa, synthetic construct
  REGION 1..536: note = Variant of B-Glucocerebrosidase
MEFSSPSREECPKPLSRVSIMAGSLTGLLLLQAVSWASGARPCIPKSFGYSSVVCVCNATYCDSVDPLTLPALGTFSRYESTRSGRRMELSMGPIQANRTGTGLLLTLQPEQKFQKVKGFGGAMTDAAALNILALSPPAQNLLLKSYFSEEGIEYNIIRVPMASCDFSIRTYTYADTPDDFQLHNFSLPEEDTKWKIPLIHRALQLSQRPVSLFASPWTSPTWLKTNGAYNGKGSLKGQPGDIYHQTWARYFVKFLDAYAEHGLQFWAVTAENEPSAGLLSGYPFQCLGFTPEHQRDFIARDLGPTLANSTHHNVRLLILDDQRLLLPHWAKVVLTNPEAAKYVHGIAVHWYLDFLAPAKWTLGETHRLFPNTTLFASEACVGSKFWEQSVRLGSWDRGMQYSHSIITNLLYHVVGWTDWNLALNPEGGPNWVRNFVDSPIIVDITKDTFYKQPMFYHLGHFSKFIPEGSTRVGLVASQKNDLDAVALLHPDGSAVVVVLNRSSKDVPLTIKDPAVGFLETISPGYSIHTYVWRRQ

SEQ ID NO: 1177 - DNA, 1608 bp, synthetic construct
  misc_feature 1..1608: note = Variant of B-Glucocerebrosidase
  source 1..1608: mol_type = other DNA
atggagttttcttctcctagtagagaagaatgccccaagccactgagcagggtgagcatcatggctggatccctcacagggctgcttcttttgcaggcagtctcatgggcctctggagccaggccctgtattcccaagtcattcggctactcctcagtggtgtgtgtatgcaatgccacctattgtgacagtgtcgatcctctcactctccctgctctgggtaccttctcccggtatgagagcacaagaagtggaagacgcatggagctctcaatgggccctatacaggctaaccgcactgggacaggtctgctgctgaccctccaacctgaacagaagtttcagaaagtcaagggatttggaggagccatgactgatgcagcagcactcaacatcttggccctgtctccaccagcccagaacctgctgttgaagtcctacttctcagaggaggggattgagtacaacatcatccgggttcccatggctagctgtgacttctccattaggacctatacatacgctgacacccccgatgattttcagctccataatttcagtctccctgaagaagacaccaaatggaagatacctctgattcacagagccttgcaactgtcccaaaggccagtgagcctcttcgcttctccctggactagtcctacatggctgaagactaatggtgcttacaatgggaagggctccctgaaaggacagccaggtgacatatatcatcagacatgggcccgctactttgtgaaattccttgatgcctatgcagagcacgggctccaattctgggcagtcaccgcagaaaacgagccctcagctgggctgctgtctggctacccctttcagtgcttgggctttactcctgagcatcaacgggacttcattgcccgggatttggggccaacactggccaacagcacccaccacaatgtaagactcctcattctggatgaccagaggctgctgctccctcattgggccaaggtggtgttgacaaacccagaagctgccaaatatgttcatggcatcgctgtccactggtacctggattttttggcccctgccaagtggactctgggagagacccacagactcttccccaataccacactgtttgcatcagaagcctgcgtggggagcaaattctgggagcagtctgttaggctgggttcctgggatcggggcatgcaatattcccatagtataataactaacctcctctaccacgtggtaggatggacagactggaatctggctttgaacccagaaggaggccccaattgggtgcgcaactttgttgacagccccatcattgtggatatcacaaaggacaccttctacaaacagcctatgttctatcatctggggcactttagcaagttcattccagagggttccactagagtaggcttggttgcctcacagaagaatgatctggatgctgtggcactcgaacatcctgacgggagtgcagtggtggtagtactgaacaggtctagcaaagatgttcccttgactatcaaagacccagctgtgggctttctggaaaccatttcccctggatactctatccacacctatctctggagaagacag

SEQ ID NO: 1178 - protein, 536 aa, synthetic construct
  REGION 1..536: note = Variant of B-Glucocerebrosidase
MEFSSPSREECPKPLSRVSIMAGSLTGLLLLQAVSWASGARPCIPKSFGYSSVVCVCNATYCDSVDPLTLPALGTFSRYESTRSGRRMELSMGPIQANRTGTGLLLTLQPEQKFQKVKGFGGAMTDAAALNILALSPPAQNLLLKSYFSEEGIEYNIIRVPMASCDFSIRTYTYADTPDDFQLHNFSLPEEDTKWKIPLIHRALQLSQRPVSLFASPWTSPTWLKTNGAYNGKGSLKGQPGDIYHQTWARYFVKFLDAYAEHGLQFWAVTAENEPSAGLLSGYPFQCLGFTPEHQRDFIARDLGPTLANSTHHNVRLLILDDQRLLLPHWAKVVLTNPEAAKYVHGIAVHWYLDFLAPAKWTLGETHRLFPNTTLFASEACVGSKFWEQSVRLGSWDRGMQYSHSIITNLLYHVVGWTDWNLALNPEGGPNWVRNFVDSPIIVDITKDTFYKQPMFYHLGHFSKFIPEGSTRVGLVASQKNDLDAVALEHPDGSAVVVVLNRSSKDVPLTIKDPAVGFLETISPGYSIHTYLWRRQ

SEQ ID NO: 1179 - DNA, 1608 bp, synthetic construct
  misc_feature 1..1608: note = Variant of B-Glucocerebrosidase
  source 1..1608: mol_type = other DNA
atggagttttcttctcctagtagagaagaatgccccaagccactgagcagggtgagcatcatggctggatccctcacagggctgcttcttttgcaggcagtctcatgggcctctggagccaggccctgtattcccaagtcattcggctactcctcagtggtgtgtgtatgcaatgccacctattgtgacagtgtcgatcctctcactctccctgctctgggtaccttctcccggtatgagagcacaagaagtggaagacgcatggagctctcaatgggccctatacaggctaaccgcactgggacaggtctgctgctgaccctccaacctgaacagaagtttcagaaagtcaagggatttggaggagccatgactgatgcagcagcactcaacatcttggccctgtctccaccagcccagaacctgctgttgaagtcctacttctcagaggaggggattgagtacaacatcatccgggttcccatggctagctgtgacttctccattaggacctatacatacgctgacacccccgatgattttcagctccataatttcagtctccctgaagaagacaccaaatggaagatacctctgattcacagagccttgcaactgtcccaaaggccagtgagcctcttcgcttctccctggactagtcctacatggctgaagactaatggtgcttacaatgggaagggctccctgaaaggacagccaggtgacatatatcatcagacatgggcccgctactttgtgaaattccttgatgcctatgcagagcacgggctccaattctgggcagtcaccgcagaaaacgagccctcagctgggctgctgtctggctacccctttcagtgcttgggctttactcctgagcatcaacgggacttcattgcccgggatttggggccaacactggccaacagcacccaccacaatgtaagactcctcattctggatgaccagaggctgctgctccctcattgggccaaggtggtgttgacaaacccagaagctgccaaatatgttcatggcatcgctgtccactggtacctggattttttggcccctgccaagtggactctgggagagacccacagactcttccccaataccacactgtttgcatcagaagcctgcgtggggagcaaattctgggagcagtctgttaggctgggttcctgggatcggggcatgcaatattcccatagtataataactaacctcctctaccacgtggtaggatggacagactggaatctggctttgaacccagaaggaggccccaattgggtgcgcaactttgttgacagccccatcattgtggatatcacaaaggacaccttctacaaacagcctatgttctatcatctggggcactttagcaagttcattccagagggttccactagagtaggcttggttgcctcacagaagaatgatctggatgctgtggcactcctgcatcctgacgggagtgcagtggtggtagtactgaacaggtctagcaaagatgttcccttgactatcaaagacccagctgtgggctttctggaaaccatttcccctggatactctatccacacctatctctggaagagacag

SEQ ID NO: 1180 - protein, 536 aa, synthetic construct
  REGION 1..536: note = Variant of B-Glucocerebrosidase
MEFSSPSREECPKPLSRVSIMAGSLTGLLLLQAVSWASGARPCIPKSFGYSSVVCVCNATYCDSVDPLTLPALGTFSRYESTRSGRRMELSMGPIQANRTGTGLLLTLQPEQKFQKVKGFGGAMTDAAALNILALSPPAQNLLLKSYFSEEGIEYNIIRVPMASCDFSIRTYTYADTPDDFQLHNFSLPEEDTKWKIPLIHRALQLSQRPVSLFASPWTSPTWLKTNGAYNGKGSLKGQPGDIYHQTWARYFVKFLDAYAEHGLQFWAVTAENEPSAGLLSGYPFQCLGFTPEHQRDFIARDLGPTLANSTHHNVRLLILDDQRLLLPHWAKVVLTNPEAAKYVHGIAVHWYLDFLAPAKWTLGETHRLFPNTTLFASEACVGSKFWEQSVRLGSWDRGMQYSHSIITNLLYHVVGWTDWNLALNPEGGPNWVRNFVDSPIIVDITKDTFYKQPMFYHLGHFSKFIPEGSTRVGLVASQKNDLDAVALLHPDGSAVVVVLNRSSKDVPLTIKDPAVGFLETISPGYSIHTYLWKRQ

SEQ ID NO: 1181 - DNA, 1608 bp, synthetic construct
  misc_feature 1..1608: note = Variant of B-Glucocerebrosidase
  source 1..1608: mol_type = other DNA
atggagttttcttctcctagtagagaagaatgccccaagccactgagcagggtgagcatcatggctggatccctcacagggctgcttcttttgcaggcagtctcatgggcctctggagccaggccctgtattcccaagtcattcggctactcctcagtggtgtgtgtatgcaatgccacctattgtgacagtgtcgatcctctcactctccctgctctgggtaccttctcccggtatgagagcacaagaagtggaagacgcatggagctctcaatgggccctatacaggctaaccgcactgggacaggtctgctgctgaccctccaacctgaacagaagtttcagaaagtcaagggatttggaggagccatgactgatgcagcagcactcaacatcttggccctgtctccaccagcccagaacctgctgttgaagtcctacttctcagaggaggggattgagtacaacatcatccgggttcccatggctagctgtgacttctccattaggacctatacatacgctgacacccccgatgattttcagctccataatttcagtctccctgaagaagacaccaaatggaagatacctctgattcacagagccttgcaactgtcccaaaggccagtgagcctcttcgcttctccctggactagtcctacatggctgaagactaatggtgcttacaatgggaagggctccctgaaaggacagccaggtgacatatatcatcagacatgggcccgctactttgtgaaattccttgatgcctatgcagagcacgggctccaattctgggcagtcaccgcagaaaacgagccctcagctgggctgctgtctggctacccctttcagtgcttgggctttactcctgagcatcaacgggacttcattgcccgggatttggggccaacactggccaacagcacccaccacaatgtaagactcctcattctggatgaccagaggctgctgctccctcattgggccaaggtggtgttgacaaacccagaagctgccaaatatgttcatggcatcgctgtccactggtacctggattttttggcccctgccaagtggactctgggagagacccacagactcttccccaataccacactgtttgcatcagaagcctgcgtggggagcaaattctgggagcagtctgttaggctgggttcctgggatcggggcatgcaatattcccatagtataataactaacctcctctaccacgtggtaggatggacagactggaatctggctttgaacccagaaggaggccccaattgggtgcgcaactttgttgacagccccatcattgtggatatcacaaaggacaccttctacaaacagcctatgttctatcatctggggcactttagcaagttcattccagagggttccactagagtaggcttggttgcctcacagaagaatgatctggatgctgtggcactcctgcatcctgacgggacagcagtggtggtagtactgaacaggtctagcaaagatgttcccttgactatcaaagacccagctgtgggctttctggaaaccatttcccctggatactctatccacacctatctctggagaagacag

SEQ ID NO: 1182 - protein, 536 aa, synthetic construct
  REGION 1..536: note = Variant of B-Glucocerebrosidase
MEFSSPSREECPKPLSRVSIMAGSLTGLLLLQAVSWASGARPCIPKSFGYSSVVCVCNATYCDSVDPLTLPALGTFSRYESTRSGRRMELSMGPIQANRTGTGLLLTLQPEQKFQKVKGFGGAMTDAAALNILALSPPAQNLLLKSYFSEEGIEYNIIRVPMASCDFSIRTYTYADTPDDFQLHNFSLPEEDTKWKIPLIHRALQLSQRPVSLFASPWTSPTWLKTNGAYNGKGSLKGQPGDIYHQTWARYFVKFLDAYAEHGLQFWAVTAENEPSAGLLSGYPFQCLGFTPEHQRDFIARDLGPTLANSTHHNVRLLILDDQRLLLPHWAKVVLTNPEAAKYVHGIAVHWYLDFLAPAKWTLGETHRLFPNTTLFASEACVGSKFWEQSVRLGSWDRGMQYSHSIITNLLYHVVGWTDWNLALNPEGGPNWVRNFVDSPIIVDITKDTFYKQPMFYHLGHFSKFIPEGSTRVGLVASQKNDLDAVALLHPDGTAVVVVLNRSSKDVPLTIKDPAVGFLETISPGYSIHTYLWRRQ

SEQ ID NO: 1183 - DNA, 1608 bp, synthetic construct
  misc_feature 1..1608: note = Variant of B-Glucocerebrosidase
  source 1..1608: mol_type = other DNA
atggagttttcttctcctagtagagaagaatgccccaagccactgagcagggtgagcatcatggctggatccctcacagggctgcttcttttgcaggcagtctcatgggcctctggagccaggccctgtattcccaagtcattcggctactcctcagtggtgtgtgtatgcaatgccacctattgtgacagtgtcgatcctctcactctccctgctctgggtaccttctcccggtatgagagcacaagaagtggaagacgcatggagctctcaatgggccctatacaggctaaccgcactgggacaggtctgctgctgaccctccaacctgaacagaagtttcagaaagtcaagggatttggaggagccatgactgatgcagcagcactcaacatcttggccctgtctccaccagcccagaacctgctgttgaagtcctacttctcagaggaggggattgagtacaacatcatccgggttcccatggctagctgtgacttctccattaggacctatacatacgctgacacccccgatgattttggactccataatttcagtctccctgaagaagacaccaaatggaagatacctctgattcacagagccttgcaactgtcccaaaggccagtgagcctcttcgcttctccctggactagtcctacatggctgaagactaatggtgcttacaatgggaagggctccctgaaaggacagccaggtgacatatatcatcagacatgggcccgctactttgtgaaattccttgatgcctatgcagagcacgggctccaattctgggcagtcaccgcagaaaacgagccctcagctgggctgctgtctggctacccctttcagtgcttgggctttactcctgagcatcaacgggacttcattgcccgggatttggggccaacactggccaacagcacccaccacaatgtaagactcctcattctggatgaccagaggctgctgctccctcattgggccaaggtggtgttgacaaacccagaagctgccaaatatgttcatggcatcgctgtccactggtacctggattttttggcccctgccaagtggactctgggagagacccacagactcttccccaataccacactgtttgcatcagaagcctgcgtggggagcaaattctgggagcagtctgttaggctgggttcctgggatcggggcatgcaatattcccatagtataataactaacctcctctaccacgtggtaggatggacagactggaatctggctttgaacccagaaggaggccccaattgggtgcgcaactttgttgacagccccatcattgtggatatcacaaaggacaccttctacaaacagcctatgttctatcatctggggcactttagcaagttcattccagagggttccactagagtaggcttggttgcctcacagaagaatgatctggatgctgtggcactcctgcatcctgacgggagtgcagtggtggtagtactgaacaggtctagcaaagatgttcccttgactatcaaagacccagctgtgggctttctggaaaccatttcccctggatactctatccacacctatctctggagaagacag

SEQ ID NO: 1184 - protein, 536 aa, synthetic construct
  REGION 1..536: note = Variant of B-Glucocerebrosidase
MEFSSPSREECPKPLSRVSIMAGSLTGLLLLQAVSWASGARPCIPKSFGYSSVVCVCNATYCDSVDPLTLPALGTFSRYESTRSGRRMELSMGPIQANRTGTGLLLTLQPEQKFQKVKGFGGAMTDAAALNILALSPPAQNLLLKSYFSEEGIEYNIIRVPMASCDFSIRTYTYADTPDDFGLHNFSLPEEDTKWKIPLIHRALQLSQRPVSLFASPWTSPTWLKTNGAYNGKGSLKGQPGDIYHQTWARYFVKFLDAYAEHGLQFWAVTAENEPSAGLLSGYPFQCLGFTPEHQRDFIARDLGPTLANSTHHNVRLLILDDQRLLLPHWAKVVLTNPEAAKYVHGIAVHWYLDFLAPAKWTLGETHRLFPNTTLFASEACVGSKFWEQSVRLGSWDRGMQYSHSIITNLLYHVVGWTDWNLALNPEGGPNWVRNFVDSPIIVDITKDTFYKQPMFYHLGHFSKFIPEGSTRVGLVASQKNDLDAVALLHPDGSAVVVVLNRSSKDVPLTIKDPAVGFLETISPGYSIHTYLWRRQ

SEQ ID NO: 1185 - DNA, 1608 bp, synthetic construct
  misc_feature 1..1608: note = Variant of B-Glucocerebrosidase
  source 1..1608: mol_type = other DNA
atggagttttcttctcctagtagagaagaatgccccaagccactgagcagggtgagcatcatggctggatccctcacagggctgcttcttttgcaggcagtctcatgggcctctggagccaggccctgtattcccaagtcattcggctactcctcagtggtgtgtgtatgcaatgccacctattgtgacagtgtcgatcctctcactctccctgctctgggtaccttctcccggtatgagagcacaagaagtggaagacgcatggagctctcaatgggccctatacaggctaaccgcactgggacaggtctgctgctgaccctccaacctgaacagaagtttcagaaagtcaagggatttggaggagccatgactgatgcagcagcactcaacatcttggccctgtctcagccagcccagaacctgctgttgaagtcctacttctcagaggaggggattgagtacaacatcatccgggttcccatggctagctgtgacttctccattaggacctatacatacgctgacacccccgatgattttcagctccataatttcagtctccctgaagaagacaccaaatggaagatacctctgattcacagagccttgcaactgtcccaaaggccagtgagcctcttcgcttctccctggactagtcctacatggctgaagactaatggtgcttacaatgggaagggctccctgaaaggacagccaggtgacatatatcatcagacatgggcccgctactttgtgaaattccttgatgcctatgcagagcacgggctccaattctgggcagtcaccgcagaaaacgagccctcagctgggctgctgtctggctacccctttcagtgcttgggctttactcctgagcatcaacgggacttcattgcccgggatttggggccaacactggccaacagcacccaccacaatgtaagactcctcattctggatgaccagaggctgctgctccctcattgggccaaggtggtgttgacaaacccagaagctgccaaatatgttcatggcatcgctgtccactggtacctggattttttggcccctgccaagtggactctgggagagacccacagactcttccccaataccacactgtttgcatcagaagcctgcgtggggagcaaattctgggagcagtctgttaggctgggttcctgggatcggggcatgcaatattcccatagtataataactaacctcctctaccacgtggtaggatggacagactggaatctggctttgaacccagaaggaggccccaattgggtgcgcaactttgttgacagccccatcattgtggatatcacaaaggacaccttctacaaacagcctatgttctatcatctggggcactttagcaagttcattccagagggttccactagagtaggcttggttgcctcacagaagaatgatctggatgctgtggcactcctgcatcctgacgggagtgcagtggtggtagtactgaacaggtctagcaaagatgttcccttgactatcaaagacccagctgtgggctttctggaaaccatttcccctggatactctatccacacctatctctggagaagacag

SEQ ID NO: 1186 - protein, 536 aa, synthetic construct
  REGION 1..536: note = Variant of B-Glucocerebrosidase
MEFSSPSREECPKPLSRVSIMAGSLTGLLLLQAVSWASGARPCIPKSFGYSSVVCVCNATYCDSVDPLTLPALGTFSRYESTRSGRRMELSMGPIQANRTGTGLLLTLQPEQKFQKVKGFGGAMTDAAALNILALSQPAQNLLLKSYFSEEGIEYNIIRVPMASCDFSIRTYTYADTPDDFQLHNFSLPEEDTKWKIPLIHRALQLSQRPVSLFASPWTSPTWLKTNGAYNGKGSLKGQPGDIYHQTWARYFVKFLDAYAEHGLQFWAVTAENEPSAGLLSGYPFQCLGFTPEHQRDFIARDLGPTLANSTHHNVRLLILDDQRLLLPHWAKVVLTNPEAAKYVHGIAVHWYLDFLAPAKWTLGETHRLFPNTTLFASEACVGSKFWEQSVRLGSWDRGMQYSHSIITNLLYHVVGWTDWNLALNPEGGPNWVRNFVDSPIIVDITKDTFYKQPMFYHLGHFSKFIPEGSTRVGLVASQKNDLDAVALLHPDGSAVVVVLNRSSKDVPLTIKDPAVGFLETISPGYSIHTYLWRRQ

SEQ ID NO: 1187 - DNA, 1608 bp, synthetic construct
  misc_feature 1..1608: note = Variant of B-Glucocerebrosidase
  source 1..1608: mol_type = other DNA
atggagttttcttctcctagtagagaagaatgccccaagccactgagcagggtgagcatcatggctggatccctcacagggctgcttcttttgcaggcagtctcatgggcctctggagccaggccctgtattcccaagtcattcggctactcctcagtggtgtgtgtatgcaatgccacctattgtgacagtgtcgatcctctcactctccctgctctgggtaccttctcccggtatgagagcacaagaagtggaagacgcatggagctctcaatgggccctatacaggctaaccgcactgggacaggtctgctgctgaccctccaacctgaacagaagtttcagaaagtcaagggatttggaggagccatgactgatgcagcagcactcaacatcttggccctgtctccaccagcccagaacctgctgttgaagtcctacttctcagaggaggggattgagtacaacatcatccgggttcccatggctagctgtgacttctccattaggacctatacatacgctgacacccccgatgattttcagctccataatttcagtctccctgaagaagacaccaaatggaagatacctctgattcacagagcccaacaactgtcccaaaggccagtgagcctcttcgcttctccctggactagtcctacatggctgaagactaatggtgcttacaatgggaagggctccctgaaaggacagccaggtgacatatatcatcagacatgggcccgctactttgtgaaattccttgatgcctatgcagagcacgggctccaattctgggcagtcaccgcagaaaacgagccctcagctgggctgctgtctggctacccctttcagtgcttgggctttactcctgagcatcaacgggacttcattgcccgggatttggggccaacactggccaacagcacccaccacaatgtaagactcctcattctggatgaccagaggctgctgctccctcattgggccaaggtggtgttgacaaacccagaagctgccaaatatgttcatggcatcgctgtccactggtacctggattttttggcccctgccaagtggactctgggagagacccacagactcttccccaataccacactgtttgcatcagaagcctgcgtggggagcaaattctgggagcagtctgttaggctgggttcctgggatcggggcatgcaatattcccatagtataataactaacctcctctaccacgtggtaggatggacagactggaatctggctttgaacccagaaggaggccccaattgggtgcgcaactttgttgacagccccatcattgtggatatcacaaaggacaccttctacaaacagcctatgttctatcatctggggcactttagcaagttcattccagagggttccactagagtaggcttggttgcctcacagaagaatgatctggatgctgtggcactcctgcatcctgacgggagtgcagtggtggtagtactgaacaggtctagcaaagatgttcccttgactatcaaagacccagctgtgggctttctggaaaccatttcccctggatactctatccacacctatctctggagaagacag

SEQ ID NO: 1188 - protein, 536 aa, synthetic construct
  REGION 1..536: note = Variant of B-Glucocerebrosidase
MEFSSPSREECPKPLSRVSIMAGSLTGLLLLQAVSWASGARPCIPKSFGYSSVVCVCNATYCDSVDPLTLPALGTFSRYESTRSGRRMELSMGPIQANRTGTGLLLTLQPEQKFQKVKGFGGAMTDAAALNILALSPPAQNLLLKSYFSEEGIEYNIIRVPMASCDFSIRTYTYADTPDDFQLHNFSLPEEDTKWKIPLIHRAQQLSQRPVSLFASPWTSPTWLKTNGAYNGKGSLKGQPGDIYHQTWARYFVKFLDAYAEHGLQFWAVTAENEPSAGLLSGYPFQCLGFTPEHQRDFIARDLGPTLANSTHHNVRLLILDDQRLLLPHWAKVVLTNPEAAKYVHGIAVHWYLDFLAPAKWTLGETHRLFPNTTLFASEACVGSKFWEQSVRLGSWDRGMQYSHSIITNLLYHVVGWTDWNLALNPEGGPNWVRNFVDSPIIVDITKDTFYKQPMFYHLGHFSKFIPEGSTRVGLVASQKNDLDAVALLHPDGSAVVVVLNRSSKDVPLTIKDPAVGFLETISPGYSIHTYLWRRQ

SEQ ID NO: 1189 - DNA, 1608 bp, synthetic construct
  misc_feature 1..1608: note = Variant of B-Glucocerebrosidase
  source 1..1608: mol_type = other DNA
atggagttttcttctcctagtagagaagaatgccccaagccactgagcagggtgagcatcatggctggatccctcacagggctgcttcttttgcaggcagtctcatgggcctctggagccaggccctgtattcccaagtcattcggctactcctcagtggtgtgtgtatgcaatgccacctattgtgacagtgtcgatcctctcactctccctgctctgggtaccttctcccggtatgagagcacaagaagtggaagacgcatggagctctcaatgggccctatacaggctaaccgcactgggacaggtctgctgctgaccctccaacctgaacagaagtttcagaaagtcaagggatttggaggagccatgactgatgcagcagcactcaacatcttggccctgtctccaccagcccagaacctgctgttgaagtcctacttctcagaggaggggattgagtacaacatcatccgggttcccatggctagctgtgacttctccattaggacctatacatacgctgacacccccgatgattttcagctccataatttcagtctccctgaagaagacacccactggaagatacctctgattcacagagccttgcaactgtcccaaaggccagtgagcctcttcgcttctccctggactagtcctacatggctgaagactaatggtgcttacaatgggaagggctccctgaaaggacagccaggtgacatatatcatcagacatgggcccgctactttgtgaaattccttgatgcctatgcagagcacgggctccaattctgggcagtcaccgcagaaaacgagccctcagctgggctgctgtctggctacccctttcagtgcttgggctttactcctgagcatcaacgggacttcattgcccgggatttggggccaacactggccaacagcacccaccacaatgtaagactcctcattctggatgaccagaggctgctgctccctcattgggccaaggtggtgttgacaaacccagaagctgccaaatatgttcatggcatcgctgtccactggtacctggattttttggcccctgccaagtggactctgggagagacccacagactcttccccaataccacactgtttgcatcagaagcctgcgtggggagcaaattctgggagcagtctgttaggctgggttcctgggatcggggcatgcaatattcccatagtataataactaacctcctctaccacgtggtaggatggacagactggaatctggctttgaacccagaaggaggccccaattgggtgcgcaactttgttgacagccccatcattgtggatatcacaaaggacaccttctacaaacagcctatgttctatcatctggggcactttagcaagttcattccagagggttccactagagtaggcttggttgcctcacagaagaatgatctggatgctgtggcactcctgcatcctgacgggagtgcagtggtggtagtactgaacaggtctagcaaagatgttcccttgactatcaaagacccagctgtgggctttctggaaaccatttcccctggatactctatccacacctatctctggagaagacag

SEQ ID NO: 1190 - protein, 536 aa, synthetic construct
  REGION 1..536: note = Variant of B-Glucocerebrosidase
MEFSSPSREECPKPLSRVSIMAGSLTGLLLLQAVSWASGARPCIPKSFGYSSVVCVCNATYCDSVDPLTLPALGTFSRYESTRSGRRMELSMGPIQANRTGTGLLLTLQPEQKFQKVKGFGGAMTDAAALNILALSPPAQNLLLKSYFSEEGIEYNIIRVPMASCDFSIRTYTYADTPDDFQLHNFSLPEEDTHWKIPLIHRALQLSQRPVSLFASPWTSPTWLKTNGAYNGKGSLKGQPGDIYHQTWARYFVKFLDAYAEHGLQFWAVTAENEPSAGLLSGYPFQCLGFTPEHQRDFIARDLGPTLANSTHHNVRLLILDDQRLLLPHWAKVVLTNPEAAKYVHGIAVHWYLDFLAPAKWTLGETHRLFPNTTLFASEACVGSKFWEQSVRLGSWDRGMQYSHSIITNLLYHVVGWTDWNLALNPEGGPNWVRNFVDSPIIVDITKDTFYKQPMFYHLGHFSKFIPEGSTRVGLVASQKNDLDAVALLHPDGSAVVVVLNRSSKDVPLTIKDPAVGFLETISPGYSIHTYLWRRQ

SEQ ID NO: 1191 - DNA, 1608 bp, synthetic construct
  misc_feature 1..1608: note = Variant of B-Glucocerebrosidase
  source 1..1608: mol_type = other DNA
atggagttttcttctcctagtagagaagaatgccccaagccactgagcagggtgagcatcatggctggatccctcacagggctgcttcttttgcaggcagtctcatgggcctctggagccaggccctgtattcccaagtcattcggctactcctcagtggtgtgtgtatgcaatgccacctattgtgacagtgtcgatcctctcactctccctgctctgggtaccttctcccggtatgagagcacaagaagtggaagacgcatggagctctcaatgggccctatacaggctaaccgcactgggacaggtctgctgctgaccctccaacctgaacagaagtttcagaaagtcaagggatttggaggagccatgactgatgcagcagcactcaacatcttggccctgtctccaccagcccagaacctgctgttgaagtcctacttctcagaggaggggattgagtacaacatcatccgggttcccatggctagctgtgacttctccattaggacctatacatacgctgacacccccgatgattttcagctccagaatttcagtctccctgaagaagacaccaaatggaagatacctctgattcacagagccttgcaactgtcccaaaggccagtgagcctcttcgcttctccctggactagtcctacatggctgaagactaatggtgcttacaatgggaagggctccctgaaaggacagccaggtgacatatatcatcagacatgggcccgctactttgtgaaattccttgatgcctatgcagagcacgggctccaattctgggcagtcaccgcagaaaacgagccctcagctgggctgctgtctggctacccctttcagtgcttgggctttactcctgagcatcaacgggacttcattgcccgggatttggggccaacactggccaacagcacccaccacaatgtaagactcctcattctggatgaccagaggctgctgctccctcattgggccaaggtggtgttgacaaacccagaagctgccaaatatgttcatggcatcgctgtccactggtacctggattttttggcccctgccaagtggactctgggagagacccacagactcttccccaataccacactgtttgcatcagaagcctgcgtggggagcaaattctgggagcagtctgttaggctgggttcctgggatcggggcatgcaatattcccatagtataataactaacctcctctaccacgtggtaggatggacagactggaatctggctttgaacccagaaggaggccccaattgggtgcgcaactttgttgacagccccatcattgtggatatcacaaaggacaccttctacaaacagcctatgttctatcatctggggcactttagcaagttcattccagagggttccactagagtaggcttggttgcctcacagaagaatgatctggatgctgtggcactcctgcatcctgacgggagtgcagtggtggtagtactgaacaggtctagcaaagatgttcccttgactatcaaagacccagctgtgggctttctggaaaccatttcccctggatactctatccacacctatctctggagaagacag

SEQ ID NO: 1192 - protein, 536 aa, synthetic construct
  REGION 1..536: note = Variant of B-Glucocerebrosidase
MEFSSPSREECPKPLSRVSIMAGSLTGLLLLQAVSWASGARPCIPKSFGYSSVVCVCNATYCDSVDPLTLPALGTFSRYESTRSGRRMELSMGPIQANRTGTGLLLTLQPEQKFQKVKGFGGAMTDAAALNILALSPPAQNLLLKSYFSEEGIEYNIIRVPMASCDFSIRTYTYADTPDDFQLQNFSLPEEDTKWKIPLIHRALQLSQRPVSLFASPWTSPTWLKTNGAYNGKGSLKGQPGDIYHQTWARYFVKFLDAYAEHGLQFWAVTAENEPSAGLLSGYPFQCLGFTPEHQRDFIARDLGPTLANSTHHNVRLLILDDQRLLLPHWAKVVLTNPEAAKYVHGIAVHWYLDFLAPAKWTLGETHRLFPNTTLFASEACVGSKFWEQSVRLGSWDRGMQYSHSIITNLLYHVVGWTDWNLALNPEGGPNWVRNFVDSPIIVDITKDTFYKQPMFYHLGHFSKFIPEGSTRVGLVASQKNDLDAVALLHPDGSAVVVVLNRSSKDVPLTIKDPAVGFLETISPGYSIHTYLWRRQ

SEQ ID NO: 1193 - DNA, 1608 bp, synthetic construct
  misc_feature 1..1608: note = Variant of B-Glucocerebrosidase
  source 1..1608: mol_type = other DNA
atggagttttcttctcctagtagagaagaatgccccaagccactgagcagggtgagcatcatggctggatccctcacagggctgcttcttttgcaggcagtctcatgggcctctggagccaggccctgtattcccaagtcattcggctactcctcagtggtgtgtgtatgcaatgccacctattgtgacagtgtcgatcctctcactctccctgctctgggtaccttctcccggtatgagagcacaagaagtggaagacgcatggagctctcaatgggccctatacaggctaaccgcactgggacaggtctgctgctgaccctccaacctgaacagaagtttcagaaagtcaagggatttggaggagccatgactgatgcagcagcactcaacatcttggccctgtctccaccagcccagaacctgctgttgaagtcctacttctcagaggaggggattgagtacaacatcatccgggttcccatggctagctgtgacttctccattaggacctatacatacgctgacacccccgatgattttcagctccataatttcagtctccctgaagaagacaccaaatggaagatacctctgattcaccaggccttgcaactgtcccaaaggccagtgagcctcttcgcttctccctggactagtcctacatggctgaagactaatggtgcttacaatgggaagggctccctgaaaggacagccaggtgacatatatcatcagacatgggcccgctactttgtgaaattccttgatgcctatgcagagcacgggctccaattctgggcagtcaccgcagaaaacgagccctcagctgggctgctgtctggctacccctttcagtgcttgggctttactcctgagcatcaacgggacttcattgcccgggatttggggccaacactggccaacagcacccaccacaatgtaagactcctcattctggatgaccagaggctgctgctccctcattgggccaaggtggtgttgacaaacccagaagctgccaaatatgttcatggcatcgctgtccactggtacctggattttttggcccctgccaagtggactctgggagagacccacagactcttccccaataccacactgtttgcatcagaagcctgcgtggggagcaaattctgggagcagtctgttaggctgggttcctgggatcggggcatgcaatattcccatagtataataactaacctcctctaccacgtggtaggatggacagactggaatctggctttgaacccagaaggaggccccaattgggtgcgcaactttgttgacagccccatcattgtggatatcacaaaggacaccttctacaaacagcctatgttctatcatctggggcactttagcaagttcattccagagggttccactagagtaggcttggttgcctcacagaagaatgatctggatgctgtggcactcctgcatcctgacgggagtgcagtggtggtagtactgaacaggtctagcaaagatgttcccttgactatcaaagacccagctgtgggctttctggaaaccatttcccctggatactctatccacacctatctctggagaagacag

SEQ ID NO: 1194 - protein, 536 aa, synthetic construct
  REGION 1..536: note = Variant of B-Glucocerebrosidase
MEFSSPSREECPKPLSRVSIMAGSLTGLLLLQAVSWASGARPCIPKSFGYSSVVCVCNATYCDSVDPLTLPALGTFSRYESTRSGRRMELSMGPIQANRTGTGLLLTLQPEQKFQKVKGFGGAMTDAAALNILALSPPAQNLLLKSYFSEEGIEYNIIRVPMASCDFSIRTYTYADTPDDFQLHNFSLPEEDTKWKIPLIHQALQLSQRPVSLFASPWTSPTWLKTNGAYNGKGSLKGQPGDIYHQTWARYFVKFLDAYAEHGLQFWAVTAENEPSAGLLSGYPFQCLGFTPEHQRDFIARDLGPTLANSTHHNVRLLILDDQRLLLPHWAKVVLTNPEAAKYVHGIAVHWYLDFLAPAKWTLGETHRLFPNTTLFASEACVGSKFWEQSVRLGSWDRGMQYSHSIITNLLYHVVGWTDWNLALNPEGGPNWVRNFVDSPIIVDITKDTFYKQPMFYHLGHFSKFIPEGSTRVGLVASQKNDLDAVALLHPDGSAVVVVLNRSSKDVPLTIKDPAVGFLETISPGYSIHTYLWRRQ

SEQ ID NO: 1195 - DNA, 1608 bp, synthetic construct
  misc_feature 1..1608: note = Variant of B-Glucocerebrosidase
  source 1..1608: mol_type = other DNA
atggagttttcttctcctagtagagaagaatgccccaagccactgagcagggtgagcatcatggctggatccctcacagggctgcttcttttgcaggcagtctcatgggcctctggagccaggccctgtattcccaagtcattcggctactcctcagtggtgtgtgtatgcaatgccacctattgtgacagtgtcgatcctctcactctccctgctctgggtaccttctcccggtatgagagcacaagaagtggaagacgcatggagctctcaatgggccctatacaggctaaccgcactgggacaggtctgctgctgaccctccaacctgaacagaagtttcagaaagtcaagggatttggaggagccatgactgatgcagcagcactcaacatcttggccctgtctccaccagcccagaacctgctgttgaagtcctacttctcagaggaggggattgagtacaacatcatccgggttcccatggctagctgtgacttctccattaggacctatacatacgctgacacccccgatgattttagcctccataatttcagtctccctgaagaagacaccaaatggaagatacctctgattcacagagccttgcaactgtcccaaaggccagtgagcctcttcgcttctccctggactagtcctacatggctgaagactaatggtgcttacaatgggaagggctccctgaaaggacagccaggtgacatatatcatcagacatgggcccgctactttgtgaaattccttgatgcctatgcagagcacgggctccaattctgggcagtcaccgcagaaaacgagccctcagctgggctgctgtctggctacccctttcagtgcttgggctttactcctgagcatcaacgggacttcattgcccgggatttggggccaacactggccaacagcacccaccacaatgtaagactcctcattctggatgaccagaggctgctgctccctcattgggccaaggtggtgttgacaaacccagaagctgccaaatatgttcatggcatcgctgtccactggtacctggattttttggcccctgccaagtggactctgggagagacccacagactcttccccaataccacactgtttgcatcagaagcctgcgtggggagcaaattctgggagcagtctgttaggctgggttcctgggatcggggcatgcaatattcccatagtataataactaacctcctctaccacgtggtaggatggacagactggaatctggctttgaacccagaaggaggccccaattgggtgcgcaactttgttgacagccccatcattgtggatatcacaaaggacaccttctacaaacagcctatgttctatcatctggggcactttagcaagttcattccagagggttccactagagtaggcttggttgcctcacagaagaatgatctggatgctgtggcactcctgcatcctgacgggagtgcagtggtggtagtactgaacaggtctagcaaagatgttcccttgactatcaaagacccagctgtgggctttctggaaaccatttcccctggatactctatccacacctatctctggagaagacag

SEQ ID NO: 1196 - protein, 536 aa, synthetic construct
  REGION 1..536: note = Variant of B-Glucocerebrosidase
MEFSSPSREECPKPLSRVSIMAGSLTGLLLLQAVSWASGARPCIPKSFGYSSVVCVCNATYCDSVDPLTLPALGTFSRYESTRSGRRMELSMGPIQANRTGTGLLLTLQPEQKFQKVKGFGGAMTDAAALNILALSPPAQNLLLKSYFSEEGIEYNIIRVPMASCDFSIRTYTYADTPDDFSLHNFSLPEEDTKWKIPLIHRALQLSQRPVSLFASPWTSPTWLKTNGAYNGKGSLKGQPGDIYHQTWARYFVKFLDAYAEHGLQFWAVTAENEPSAGLLSGYPFQCLGFTPEHQRDFIARDLGPTLANSTHHNVRLLILDDQRLLLPHWAKVVLTNPEAAKYVHGIAVHWYLDFLAPAKWTLGETHRLFPNTTLFASEACVGSKFWEQSVRLGSWDRGMQYSHSIITNLLYHVVGWTDWNLALNPEGGPNWVRNFVDSPIIVDITKDTFYKQPMFYHLGHFSKFIPEGSTRVGLVASQKNDLDAVALLHPDGSAVVVVLNRSSKDVPLTIKDPAVGFLETISPGYSIHTYLWRRQ

SEQ ID NO: 1197 - DNA, 1608 bp, synthetic construct
  misc_feature 1..1608: note = Variant of B-Glucocerebrosidase
  source 1..1608: mol_type = other DNA
atggagttttcttctcctagtagagaagaatgccccaagccactgagcagggtgagcatcatggctggatccctcacagggctgcttcttttgcaggcagtctcatgggcctctggagccaggccctgtattcccaagtcattcggctactcctcagtggtgtgtgtatgcaatgccacctattgtgacagtgtcgatcctctcactctccctgctctgggtaccttctcccggtatgagagcacaagaagtggaagacgcatggagctctcaatgggccctatacaggctaaccgcactgggacaggtctgctgctgaccctccaacctgaacagaagtttcagaaagtcaagggatttggaggagccatgactgatgcagcagcactcaacatcttggccctgtctccaccagcccagaacctgctgatgaagtcctacttctcagaggaggggattgagtacaacatcatccgggttcccatggctagctgtgacttctccattaggacctatacatacgctgacacccccgatgattttcagctccataatttcagtctccctgaagaagacaccaaatggaagatacctctgattcacagagccttgcaactgtcccaaaggccagtgagcctcttcgcttctccctggactagtcctacatggctgaagactaatggtgcttacaatgggaagggctccctgaaaggacagccaggtgacatatatcatcagacatgggcccgctactttgtgaaattccttgatgcctatgcagagcacgggctccaattctgggcagtcaccgcagaaaacgagccctcagctgggctgctgtctggctacccctttcagtgcttgggctttactcctgagcatcaacgggacttcattgcccgggatttggggccaacactggccaacagcacccaccacaatgtaagactcctcattctggatgaccagaggctgctgctccctcattgggccaaggtggtgttgacaaacccagaagctgccaaatatgttcatggcatcgctgtccactggtacctggattttttggcccctgccaagtggactctgggagagacccacagactcttccccaataccacactgtttgcatcagaagcctgcgtggggagcaaattctgggagcagtctgttaggctgggttcctgggatcggggcatgcaatattcccatagtataataactaacctcctctaccacgtggtaggatggacagactggaatctggctttgaacccagaaggaggccccaattgggtgcgcaactttgttgacagccccatcattgtggatatcacaaaggacaccttctacaaacagcctatgttctatcatctggggcactttagcaagttcattccagagggttccactagagtaggcttggttgcctcacagaagaatgatctggatgctgtggcactcctgcatcctgacgggagtgcagtggtggtagtactgaacaggtctagcaaagatgttcccttgactatcaaagacccagctgtgggctttctggaaaccatttcccctggatactctatccacacctatctctggagaagacag

SEQ ID NO: 1198 - protein, 536 aa, synthetic construct
  REGION 1..536: note = Variant of B-Glucocerebrosidase
MEFSSPSREECPKPLSRVSIMAGSLTGLLLLQAVSWASGARPCIPKSFGYSSVVCVCNATYCDSVDPLTLPALGTFSRYESTRSGRRMELSMGPIQANRTGTGLLLTLQPEQKFQKVKGFGGAMTDAAALNILALSPPAQNLLMKSYFSEEGIEYNIIRVPMASCDFSIRTYTYADTPDDFQLHNFSLPEEDTKWKIPLIHRALQLSQRPVSLFASPWTSPTWLKTNGAYNGKGSLKGQPGDIYHQTWARYFVKFLDAYAEHGLQFWAVTAENEPSAGLLSGYPFQCLGFTPEHQRDFIARDLGPTLANSTHHNVRLLILDDQRLLLPHWAKVVLTNPEAAKYVHGIAVHWYLDFLAPAKWTLGETHRLFPNTTLFASEACVGSKFWEQSVRLGSWDRGMQYSHSIITNLLYHVVGWTDWNLALNPEGGPNWVRNFVDSPIIVDITKDTFYKQPMFYHLGHFSKFIPEGSTRVGLVASQKNDLDAVALLHPDGSAVVVVLNRSSKDVPLTIKDPAVGFLETISPGYSIHTYLWRRQ

SEQ ID NO: 1199 - DNA, 1608 bp, synthetic construct
  misc_feature 1..1608: note = Variant of B-Glucocerebrosidase
  source 1..1608: mol_type = other DNA
atggagttttcttctcctagtagagaagaatgccccaagccactgagcagggtgagcatcatggctggatccctcacagggctgcttcttttgcaggcagtctcatgggcctctggagccaggccctgtattcccaagtcattcggctactcctcagtggtgtgtgtatgcaatgccacctattgtgacagtgtcgatcctctcactctccctgctctgggtaccttctcccggtatgagagcacaagaagtggaagacgcatggagctctcaatgggccctatacaggctaaccgcactgggacaggtctgctgctgaccctccaacctgaacagaagtttcagaaagtcaagggatttggaggagccatgactgatgcagcagcactcaacatcttggccctgtctccaccagcccagaacaatctgttgaagtcctacttctcagaggaggggattgagtacaacatcatccgggttcccatggctagctgtgacttctccattaggacctatacatacgctgacacccccgatgattttcagctccataatttcagtctccctgaagaagacaccaaatggaagatacctctgattcacagagccttgcaactgtcccaaaggccagtgagcctcttcgcttctccctggactagtcctacatggctgaagactaatggtgcttacaatgggaagggctccctgaaaggacagccaggtgacatatatcatcagacatgggcccgctactttgtgaaattccttgatgcctatgcagagcacgggctccaattctgggcagtcaccgcagaaaacgagccctcagctgggctgctgtctggctacccctttcagtgcttgggctttactcctgagcatcaacgggacttcattgcccgggatttggggccaacactggccaacagcacccaccacaatgtaagactcctcattctggatgaccagaggctgctgctccctcattgggccaaggtggtgttgacaaacccagaagctgccaaatatgttcatggcatcgctgtccactggtacctggattttttggcccctgccaagtggactctgggagagacccacagactcttccccaataccacactgtttgcatcagaagcctgcgtggggagcaaattctgggagcagtctgttaggctgggttcctgggatcggggcatgcaatattcccatagtataataactaacctcctctaccacgtggtaggatggacagactggaatctggctttgaacccagaaggaggccccaattgggtgcgcaactttgttgacagccccatcattgtggatatcacaaaggacaccttctacaaacagcctatgttctatcatctggggcactttagcaagttcattccagagggttccactagagtaggcttggttgcctcacagaagaatgatctggatgctgtggcactcctgcatcctgacgggagtgcagtggtggtagtactgaacaggtctagcaaagatgttcccttgactatcaaagacccagctgtgggctttctggaaaccatttcccctggatactctatccacacctatctctggagaagacag

SEQ ID NO: 1200 - protein, 536 aa, synthetic construct
  REGION 1..536: note = Variant of B-Glucocerebrosidase
MEFSSPSREECPKPLSRVSIMAGSLTGLLLLQAVSWASGARPCIPKSFGYSSVVCVCNATYCDSVDPLTLPALGTFSRYESTRSGRRMELSMGPIQANRTGTGLLLTLQPEQKFQKVKGFGGAMTDAAALNILALSPPAQNNLLKSYFSEEGIEYNIIRVPMASCDFSIRTYTYADTPDDFQLHNFSLPEEDTKWKIPLIHRALQLSQRPVSLFASPWTSPTWLKTNGAYNGKGSLKGQPGDIYHQTWARYFVKFLDAYAEHGLQFWAVTAENEPSAGLLSGYPFQCLGFTPEHQRDFIARDLGPTLANSTHHNVRLLILDDQRLLLPHWAKVVLTNPEAAKYVHGIAVHWYLDFLAPAKWTLGETHRLFPNTTLFASEACVGSKFWEQSVRLGSWDRGMQYSHSIITNLLYHVVGWTDWNLALNPEGGPNWVRNFVDSPIIVDITKDTFYKQPMFYHLGHFSKFIPEGSTRVGLVASQKNDLDAVALLHPDGSAVVVVLNRSSKDVPLTIKDPAVGFLETISPGYSIHTYLWRRQ

SEQ ID NO: 1201 - DNA, 1608 bp, synthetic construct
  misc_feature 1..1608: note = Variant of B-Glucocerebrosidase
  source 1..1608: mol_type = other DNA
atggagttttcttctcctagtagagaagaatgccccaagccactgagcagggtgagcatcatggctggatccctcacagggctgcttcttttgcaggcagtctcatgggcctctggagccaggccctgtattcccaagtcattcggctactcctcagtggtgtgtgtatgcaatgccacctattgtgacagtgtcgatcctctcactctccctgctctgggtaccttctcccggtatgagagcacaagaagtggaagacgcatggagctctcaatgggccctatacaggctaaccgcactgggacaggtctgctgctgaccctccaacctgaacagaagtttcagaaagtcaagggatttggaggagccatgactgatgcagcagcactcaacatcttggccctgtctccaccagcccagaacctgctgttgaagtcctacttctcagaggaggggattgagtacaacatcatccgggttcccatggctagctgtgacttctccattaggacctatacatacgctgacacccccgatgattttcagctccataatttcagtctccctgaagaagacaccaaatggaagatacctctgattcaaagagccttgcaactgtcccaaaggccagtgagcctcttcgcttctccctggactagtcctacatggctgaagactaatggtgcttacaatgggaagggctccctgaaaggacagccaggtgacatatatcatcagacatgggcccgctactttgtgaaattccttgatgcctatgcagagcacgggctccaattctgggcagtcaccgcagaaaacgagccctcagctgggctgctgtctggctacccctttcagtgcttgggctttactcctgagcatcaacgggacttcattgcccgggatttggggccaacactggccaacagcacccaccacaatgtaagactcctcattctggatgaccagaggctgctgctccctcattgggccaaggtggtgttgacaaacccagaagctgccaaatatgttcatggcatcgctgtccactggtacctggattttttggcccctgccaagtggactctgggagagacccacagactcttccccaataccacactgtttgcatcagaagcctgcgtggggagcaaattctgggagcagtctgttaggctgggttcctgggatcggggcatgcaatattcccatagtataataactaacctcctctaccacgtggtaggatggacagactggaatctggctttgaacccagaaggaggccccaattgggtgcgcaactttgttgacagccccatcattgtggatatcacaaaggacaccttctacaaacagcctatgttctatcatctggggcactttagcaagttcattccagagggttccactagagtaggcttggttgcctcacagaagaatgatctggatgctgtggcactcctgcatcctgacgggagtgcagtggtggtagtactgaacaggtctagcaaagatgttcccttgactatcaaagacccagctgtgggctttctggaaaccatttcccctggatactctatccacacctatctctggagaagacag

SEQ ID NO: 1202 - protein, 536 aa, synthetic construct
  REGION 1..536: note = Variant of B-Glucocerebrosidase
MEFSSPSREECPKPLSRVSIMAGSLTGLLLLQAVSWASGARPCIPKSFGYSSVVCVCNATYCDSVDPLTLPALGTFSRYESTRSGRRMELSMGPIQANRTGTGLLLTLQPEQKFQKVKGFGGAMTDAAALNILALSPPAQNLLLKSYFSEEGIEYNIIRVPMASCDFSIRTYTYADTPDDFQLHNFSLPEEDTKWKIPLIQRALQLSQRPVSLFASPWTSPTWLKTNGAYNGKGSLKGQPGDIYHQTWARYFVKFLDAYAEHGLQFWAVTAENEPSAGLLSGYPFQCLGFTPEHQRDFIARDLGPTLANSTHHNVRLLILDDQRLLLPHWAKVVLTNPEAAKYVHGIAVHWYLDFLAPAKWTLGETHRLFPNTTLFASEACVGSKFWEQSVRLGSWDRGMQYSHSIITNLLYHVVGWTDWNLALNPEGGPNWVRNFVDSPIIVDITKDTFYKQPMFYHLGHFSKFIPEGSTRVGLVASQKNDLDAVALLHPDGSAVVVVLNRSSKDVPLTIKDPAVGFLETISPGYSIHTYLWRRQ

SEQ ID NO: 1203 - DNA, 1608 bp, synthetic construct
  misc_feature 1..1608: note = Variant of B-Glucocerebrosidase
  source 1..1608: mol_type = other DNA
atggagttttcttctcctagtagagaagaatgccccaagccactgagcagggtgagcatcatggctggatccctcacagggctgcttcttttgcaggcagtctcatgggcctctggagccaggccctgtattcccaagtcattcggctactcctcagtggtgtgtgtatgcaatgccacctattgtgacagtgtcgatcctctcactctccctgctctgggtaccttctcccggtatgagagcacaagaagtggaagacgcatggagctctcaatgggccctatacaggctaaccgcactgggacaggtctgctgctgaccctccaacctgaacagaagtttcagaaagtcaagggatttggaggagccatgactgatgcagcagcactcaacatcttggccctgtctccaccagcccagaacctgctgttgaagtcctacttctcagaggaggggattgagtacaacatcatccgggttcccatggctagctgtgacttctccattaggacctatacatacgctgacacccccgatgattttgacctccataatttcagtctccctgaagaagacaccaaatggaagatacctctgattcacagagccttgcaactgtcccaaaggccagtgagcctcttcgcttctccctggactagtcctacatggctgaagactaatggtgcttacaatgggaagggctccctgaaaggacagccaggtgacatatatcatcagacatgggcccgctactttgtgaaattccttgatgcctatgcagagcacgggctccaattctgggcagtcaccgcagaaaacgagccctcagctgggctgctgtctggctacccctttcagtgcttgggctttactcctgagcatcaacgggacttcattgcccgggatttggggccaacactggccaacagcacccaccacaatgtaagactcctcattctggatgaccagaggctgctgctccctcattgggccaaggtggtgttgacaaacccagaagctgccaaatatgttcatggcatcgctgtccactggtacctggattttttggcccctgccaagtggactctgggagagacccacagactcttccccaataccacactgtttgcatcagaagcctgcgtggggagcaaattctgggagcagtctgttaggctgggttcctgggatcggggcatgcaatattcccatagtataataactaacctcctctaccacgtggtaggatggacagactggaatctggctttgaacccagaaggaggccccaattgggtgcgcaactttgttgacagccccatcattgtggatatcacaaaggacaccttctacaaacagcctatgttctatcatctggggcactttagcaagttcattccagagggttccactagagtaggcttggttgcctcacagaagaatgatctggatgctgtggcactcctgcatcctgacgggagtgcagtggtggtagtactgaacaggtctagcaaagatgttcccttgactatcaaagacccagctgtgggctttctggaaaccatttcccctggatactctatccacacctatctctggagaagacag

SEQ ID NO: 1204 - protein, 536 aa, synthetic construct
  REGION 1..536: note = Variant of B-Glucocerebrosidase
MEFSSPSREECPKPLSRVSIMAGSLTGLLLLQAVSWASGARPCIPKSFGYSSVVCVCNATYCDSVDPLTLPALGTFSRYESTRSGRRMELSMGPIQANRTGTGLLLTLQPEQKFQKVKGFGGAMTDAAALNILALSPPAQNLLLKSYFSEEGIEYNIIRVPMASCDFSIRTYTYADTPDDFDLHNFSLPEEDTKWKIPLIHRALQLSQRPVSLFASPWTSPTWLKTNGAYNGKGSLKGQPGDIYHQTWARYFVKFLDAYAEHGLQFWAVTAENEPSAGLLSGYPFQCLGFTPEHQRDFIARDLGPTLANSTHHNVRLLILDDQRLLLPHWAKVVLTNPEAAKYVHGIAVHWYLDFLAPAKWTLGETHRLFPNTTLFASEACVGSKFWEQSVRLGSWDRGMQYSHSIITNLLYHVVGWTDWNLALNPEGGPNWVRNFVDSPIIVDITKDTFYKQPMFYHLGHFSKFIPEGSTRVGLVASQKNDLDAVALLHPDGSAVVVVLNRSSKDVPLTIKDPAVGFLETISPGYSIHTYLWRRQ

SEQ ID NO: 1205 - DNA, 1608 bp, synthetic construct
  misc_feature 1..1608: note = Variant of B-Glucocerebrosidase
  source 1..1608: mol_type = other DNA
atggagttttcttctcctagtagagaagaatgccccaagccactgagcagggtgagcatcatggctggatccctcacagggctgcttcttttgcaggcagtctcatgggcctctggagccaggccctgtattcccaagtcattcggctactcctcagtggtgtgtgtatgcaatgccacctattgtgacagtgtcgatcctctcactctccctgctctgggtaccttctcccggtatgagagcacaagaagtggaagacgcatggagctctcaatgggccctatacaggctaaccgcactgggacaggtctgctgctgaccctccaacctgaacagaagtttcagaaagtcaagggatttggaggagccatgactgatgcagcagcactcaacatcttggccctgtctccaccagcccagaacctgctgttgaagtcctacttctcagaggaggggattgagtacaacatcatccgggttcccatggctagctgtgacttctccattaggacctatacatacgacgacacccccgatgattttcagctccataatttcagtctccctgaagaagacaccaaatggaagatacctctgattcacagagccttgcaactgtcccaaaggccagtgagcctcttcgcttctccctggactagtcctacatggctgaagactaatggtgcttacaatgggaagggctccctgaaaggacagccaggtgacatatatcatcagacatgggcccgctactttgtgaaattccttgatgcctatgcagagcacgggctccaattctgggcagtcaccgcagaaaacgagccctcagctgggctgctgtctggctacccctttcagtgcttgggctttactcctgagcatcaacgggacttcattgcccgggatttggggccaacactggccaacagcacccaccacaatgtaagactcctcattctggatgaccagaggctgctgctccctcattgggccaaggtggtgttgacaaacccagaagctgccaaatatgttcatggcatcgctgtccactggtacctggattttttggcccctgccaagtggactctgggagagacccacagactcttccccaataccacactgtttgcatcagaagcctgcgtggggagcaaattctgggagcagtctgttaggctgggttcctgggatcggggcatgcaatattcccatagtataataactaacctcctctaccacgtggtaggatggacagactggaatctggctttgaacccagaaggaggccccaattgggtgcgcaactttgttgacagccccatcattgtggatatcacaaaggacaccttctacaaacagcctatgttctatcatctggggcactttagcaagttcattccagagggttccactagagtaggcttggttgcctcacagaagaatgatctggatgctgtggcactcctgcatcctgacgggagtgcagtggtggtagtactgaacaggtctagcaaagatgttcccttgactatcaaagacccagctgtgggctttctggaaaccatttcccctggatactctatccacacctatctctggagaagacag

SEQ ID NO: 1206 - protein, 536 aa, synthetic construct
  REGION 1..536: note = Variant of B-Glucocerebrosidase
MEFSSPSREECPKPLSRVSIMAGSLTGLLLLQAVSWASGARPCIPKSFGYSSVVCVCNATYCDSVDPLTLPALGTFSRYESTRSGRRMELSMGPIQANRTGTGLLLTLQPEQKFQKVKGFGGAMTDAAALNILALSPPAQNLLLKSYFSEEGIEYNIIRVPMASCDFSIRTYTYDDTPDDFQLHNFSLPEEDTKWKIPLIHRALQLSQRPVSLFASPWTSPTWLKTNGAYNGKGSLKGQPGDIYHQTWARYFVKFLDAYAEHGLQFWAVTAENEPSAGLLSGYPFQCLGFTPEHQRDFIARDLGPTLANSTHHNVRLLILDDQRLLLPHWAKVVLTNPEAAKYVHGIAVHWYLDFLAPAKWTLGETHRLFPNTTLFASEACVGSKFWEQSVRLGSWDRGMQYSHSIITNLLYHVVGWTDWNLALNPEGGPNWVRNFVDSPIIVDITKDTFYKQPMFYHLGHFSKFIPEGSTRVGLVASQKNDLDAVALLHPDGSAVVVVLNRSSKDVPLTIKDPAVGFLETISPGYSIHTYLWRRQ

SEQ ID NO: 1207 - DNA, 1608 bp, synthetic construct
  misc_feature 1..1608: note = Variant of B-Glucocerebrosidase
  source 1..1608: mol_type = other DNA
atggagttttcttctcctagtagagaagaatgccccaagccactgagcagggtgagcatcatggctggatccctcacagggctgcttcttttgcaggcagtctcatgggcctctggagccaggccctgtattcccaagtcattcggctactcctcagtggtgtgtgtatgcaatgccacctattgtgacagtgtcgatcctctcactctccctgctctgggtaccttctcccggtatgagagcacaagaagtggaagacgcatggagctctcaatgggccctatacaggctaaccgcactgggacaggtctgctgctgaccctccaacctgaacagaagtttcagaaagtcaagggatttggaggagccatgactgatgcagcagcactcaacatcttggccctgtctccaccagcccagaacctgctgttgaagtcctacttctcagaggaggggattgagtacaacatcatccgggttcccatggctagctgtgacttctccattaggacctatacatacgctgacacccccgatgattttaccctccataatttcagtctccctgaagaagacaccaaatggaagatacctctgattcacagagccttgcaactgtcccaaaggccagtgagcctcttcgcttctccctggactagtcctacatggctgaagactaatggtgcttacaatgggaagggctccctgaaaggacagccaggtgacatatatcatcagacatgggcccgctactttgtgaaattccttgatgcctatgcagagcacgggctccaattctgggcagtcaccgcagaaaacgagccctcagctgggctgctgtctggctacccctttcagtgcttgggctttactcctgagcatcaacgggacttcattgcccgggatttggggccaacactggccaacagcacccaccacaatgtaagactcctcattctggatgaccagaggctgctgctccctcattgggccaaggtggtgttgacaaacccagaagctgccaaatatgttcatggcatcgctgtccactggtacctggattttttggcccctgccaagtggactctgggagagacccacagactcttccccaataccacactgtttgcatcagaagcctgcgtggggagcaaattctgggagcagtctgttaggctgggttcctgggatcggggcatgcaatattcccatagtataataactaacctcctctaccacgtggtaggatggacagactggaatctggctttgaacccagaaggaggccccaattgggtgcgcaactttgttgacagccccatcattgtggatatcacaaaggacaccttctacaaacagcctatgttctatcatctggggcactttagcaagttcattccagagggttccactagagtaggcttggttgcctcacagaagaatgatctggatgctgtggcactcctgcatcctgacgggagtgcagtggtggtagtactgaacaggtctagcaaagatgttcccttgactatcaaagacccagctgtgggctttctggaaaccatttcccctggatactctatccacacctatctctggagaagacag

SEQ ID NO: 1208 - protein, 536 aa, synthetic construct
  REGION 1..536: note = Variant of B-Glucocerebrosidase
MEFSSPSREECPKPLSRVSIMAGSLTGLLLLQAVSWASGARPCIPKSFGYSSVVCVCNATYCDSVDPLTLPALGTFSRYESTRSGRRMELSMGPIQANRTGTGLLLTLQPEQKFQKVKGFGGAMTDAAALNILALSPPAQNLLLKSYFSEEGIEYNIIRVPMASCDFSIRTYTYADTPDDFTLHNFSLPEEDTKWKIPLIHRALQLSQRPVSLFASPWTSPTWLKTNGAYNGKGSLKGQPGDIYHQTWARYFVKFLDAYAEHGLQFWAVTAENEPSAGLLSGYPFQCLGFTPEHQRDFIARDLGPTLANSTHHNVRLLILDDQRLLLPHWAKVVLTNPEAAKYVHGIAVHWYLDFLAPAKWTLGETHRLFPNTTLFASEACVGSKFWEQSVRLGSWDRGMQYSHSIITNLLYHVVGWTDWNLALNPEGGPNWVRNFVDSPIIVDITKDTFYKQPMFYHLGHFSKFIPEGSTRVGLVASQKNDLDAVALLHPDGSAVVVVLNRSSKDVPLTIKDPAVGFLETISPGYSIHTYLWRRQ

SEQ ID NO: 1209 - DNA, 1608 bp, synthetic construct
  misc_feature 1..1608: note = Variant of B-Glucocerebrosidase
  source 1..1608: mol_type = other DNA
atggagttttcttctcctagtagagaagaatgccccaagccactgagcagggtgagcatcatggctggatccctcacagggctgcttcttttgcaggcagtctcatgggcctctggagccaggccctgtattcccaagtcattcggctactcctcagtggtgtgtgtatgcaatgccacctattgtgacagtgtcgatcctctcactctccctgctctgggtaccttctcccggtatgagagcacaagaagtggaagacgcatggagctctcaatgggccctatacaggctaaccgcactgggacaggtctgctgctgaccctccaacctgaacagaagtttcagaaagtcaagggatttggaggagccatgactgatgcagcagcactcaacatcttggccctgtctccaccagcccagaacctgctgttgaagtcctacttctcagaggaggggattgagtacaacatcatccgggttcccatggctagctgtgacttctccattaggacctatacatacgctgacacccccgatgattttcagctccataatttcagtctccctgaagaagacacccaatggaagatacctctgattcacagagccttgcaactgtcccaaaggccagtgagcctcttcgcttctccctggactagtcctacatggctgaagactaatggtgcttacaatgggaagggctccctgaaaggacagccaggtgacatatatcatcagacatgggcccgctactttgtgaaattccttgatgcctatgcagagcacgggctccaattctgggcagtcaccgcagaaaacgagccctcagctgggctgctgtctggctacccctttcagtgcttgggctttactcctgagcatcaacgggacttcattgcccgggatttggggccaacactggccaacagcacccaccacaatgtaagactcctcattctggatgaccagaggctgctgctccctcattgggccaaggtggtgttgacaaacccagaagctgccaaatatgttcatggcatcgctgtccactggtacctggattttttggcccctgccaagtggactctgggagagacccacagactcttccccaataccacactgtttgcatcagaagcctgcgtggggagcaaattctgggagcagtctgttaggctgggttcctgggatcggggcatgcaatattcccatagtataataactaacctcctctaccacgtggtaggatggacagactggaatctggctttgaacccagaaggaggccccaattgggtgcgcaactttgttgacagccccatcattgtggatatcacaaaggacaccttctacaaacagcctatgttctatcatctggggcactttagcaagttcattccagagggttccactagagtaggcttggttgcctcacagaagaatgatctggatgctgtggcactcctgcatcctgacgggagtgcagtggtggtagtactgaacaggtctagcaaagatgttcccttgactatcaaagacccagctgtgggctttctggaaaccatttcccctggatactctatccacacctatctctggagaagacag

SEQ ID NO: 1210 - protein, 536 aa, synthetic construct
  REGION 1..536: note = Variant of B-Glucocerebrosidase
MEFSSPSREECPKPLSRVSIMAGSLTGLLLLQAVSWASGARPCIPKSFGYSSVVCVCNATYCDSVDPLTLPALGTFSRYESTRSGRRMELSMGPIQANRTGTGLLLTLQPEQKFQKVKGFGGAMTDAAALNILALSPPAQNLLLKSYFSEEGIEYNIIRVPMASCDFSIRTYTYADTPDDFQLHNFSLPEEDTQWKIPLIHRALQLSQRPVSLFASPWTSPTWLKTNGAYNGKGSLKGQPGDIYHQTWARYFVKFLDAYAEHGLQFWAVTAENEPSAGLLSGYPFQCLGFTPEHQRDFIARDLGPTLANSTHHNVRLLILDDQRLLLPHWAKVVLTNPEAAKYVHGIAVHWYLDFLAPAKWTLGETHRLFPNTTLFASEACVGSKFWEQSVRLGSWDRGMQYSHSIITNLLYHVVGWTDWNLALNPEGGPNWVRNFVDSPIIVDITKDTFYKQPMFYHLGHFSKFIPEGSTRVGLVASQKNDLDAVALLHPDGSAVVVVLNRSSKDVPLTIKDPAVGFLETISPGYSIHTYLWRRQ

SEQ ID NO: 1211 - DNA, 1608 bp, synthetic construct
  misc_feature 1..1608: note = Variant of B-Glucocerebrosidase
  source 1..1608: mol_type = other DNA
atggagttttcttctcctagtagagaagaatgccccaagccactgagcagggtgagcatcatggctggatccctcacagggctgcttcttttgcaggcagtctcatgggcctctggagccaggccctgtattcccaagtcattcggctactcctcagtggtgtgtgtatgcaatgccacctattgtgacagtgtcgatcctctcactctccctgctctgggtaccttctcccggtatgagagcacaagaagtggaagacgcatggagctctcaatgggccctatacaggctaaccgcactgggacaggtctgctgctgaccctccaacctgaacagaagtttcagaaagtcaagggatttggaggagccatgactgatgcagcagcactcaacatcttggccctgtctccaccagcccagaacctgctgttgaagtcctacttctcagaggaggggattgagtacaacatcatccgggttcccatggctagctgtgacttctccattaggacctatacatacgctgacacccccgatgattttcagctccataatttcagtctccctgaagaagacaccaaatggaagatacctctgattcacagagccttgcaactgtcccaaaggccagtgagcctcttcgcttctccctggactgctcctacatggctgaagactaatggtgcttacaatgggaagggctccctgaaaggacagccaggtgacatatatcatcagacatgggcccgctactttgtgaaattccttgatgcctatgcagagcacgggctccaattctgggcagtcaccgcagaaaacgagccctcagctgggctgctgtctggctacccctttcagtgcttgggctttactcctgagcatcaacgggacttcattgcccgggatttggggccaacactggccaacagcacccaccacaatgtaagactcctcattctggatgaccagaggctgctgctccctcattgggccaaggtggtgttgacaaacccagaagctgccaaatatgttcatggcatcgctgtccactggtacctggattttttggcccctgccaagtggactctgggagagacccacagactcttccccaataccacactgtttgcatcagaagcctgcgtggggagcaaattctgggagcagtctgttaggctgggttcctgggatcggggcatgcaatattcccatagtataataactaacctcctctaccacgtggtaggatggacagactggaatctggctttgaacccagaaggaggccccaattgggtgcgcaactttgttgacagccccatcattgtggatatcacaaaggacaccttctacaaacagcctatgttctatcatctggggcactttagcaagttcattccagagggttccactagagtaggcttggttgcctcacagaagaatgatctggatgctgtggcactcctgcatcctgacgggagtgcagtggtggtagtactgaacaggtctagcaaagatgttcccttgactatcaaagacccagctgtgggctttctggaaaccatttcccctggatactctatccacacctatctctggagaagacag

SEQ ID NO: 1212 - protein, 536 aa, synthetic construct
  REGION 1..536: note = Variant of B-Glucocerebrosidase
MEFSSPSREECPKPLSRVSIMAGSLTGLLLLQAVSWASGARPCIPKSFGYSSVVCVCNATYCDSVDPLTLPALGTFSRYESTRSGRRMELSMGPIQANRTGTGLLLTLQPEQKFQKVKGFGGAMTDAAALNILALSPPAQNLLLKSYFSEEGIEYNIIRVPMASCDFSIRTYTYADTPDDFQLHNFSLPEEDTKWKIPLIHRALQLSQRPVSLFASPWTAPTWLKTNGAYNGKGSLKGQPGDIYHQTWARYFVKFLDAYAEHGLQFWAVTAENEPSAGLLSGYPFQCLGFTPEHQRDFIARDLGPTLANSTHHNVRLLILDDQRLLLPHWAKVVLTNPEAAKYVHGIAVHWYLDFLAPAKWTLGETHRLFPNTTLFASEACVGSKFWEQSVRLGSWDRGMQYSHSIITNLLYHVVGWTDWNLALNPEGGPNWVRNFVDSPIIVDITKDTFYKQPMFYHLGHFSKFIPEGSTRVGLVASQKNDLDAVALLHPDGSAVVVVLNRSSKDVPLTIKDPAVGFLETISPGYSIHTYLWRRQ

SEQ ID NO: 1213 - DNA, 1608 bp, synthetic construct
  misc_feature 1..1608: note = Variant of B-Glucocerebrosidase
  source 1..1608: mol_type = other DNA
atggagttttcttctcctagtagagaagaatgccccaagccactgagcagggtgagcatcatggctggatccctcacagggctgcttcttttgcaggcagtctcatgggcctctggagccaggccctgtattcccaagtcattcggctactcctcagtggtgtgtgtatgcaatgccacctattgtgacagtgtcgatcctctcactctccctgctctgggtaccttctcccggtatgagagcacaagaagtggaagacgcatggagctctcaatgggccctatacaggctaaccgcactgggacaggtctgctgctgaccctccaacctgaacagaagtttcagaaagtcaagggatttggaggagccatgactgatgcagcagcactcaacatcttggccctgtctccaccagcccagaacctgctgttgaagtcctacttctcaacagaggggattgagtacaacatcatccgggttcccatggctagctgtgacttctccattaggacctatacatacgctgacacccccgatgattttcagctccataatttcagtctccctgaagaagacaccaaatggaagatacctctgattcacagagccttgcaactgtcccaaaggccagtgagcctcttcgcttctccctggactagtcctacatggctgaagactaatggtgcttacaatgggaagggctccctgaaaggacagccaggtgacatatatcatcagacatgggcccgctactttgtgaaattccttgatgcctatgcagagcacgggctccaattctgggcagtcaccgcagaaaacgagccctcagctgggctgctgtctggctacccctttcagtgcttgggctttactcctgagcatcaacgggacttcattgcccgggatttggggccaacactggccaacagcacccaccacaatgtaagactcctcattctggatgaccagaggctgctgctccctcattgggccaaggtggtgttgacaaacccagaagctgccaaatatgttcatggcatcgctgtccactggtacctggattttttggcccctgccaagtggactctgggagagacccacagactcttccccaataccacactgtttgcatcagaagcctgcgtggggagcaaattctgggagcagtctgttaggctgggttcctgggatcggggcatgcaatattcccatagtataataactaacctcctctaccacgtggtaggatggacagactggaatctggctttgaacccagaaggaggccccaattgggtgcgcaactttgttgacagccccatcattgtggatatcacaaaggacaccttctacaaacagcctatgttctatcatctggggcactttagcaagttcattccagagggttccactagagtaggcttggttgcctcacagaagaatgatctggatgctgtggcactcctgcatcctgacgggagtgcagtggtggtagtactgaacaggtctagcaaagatgttcccttgactatcaaagacccagctgtgggctttctggaaaccatttcccctggatactctatccacacctatctctggagaagacag

SEQ ID NO: 1214 - protein, 536 aa, synthetic construct
  REGION 1..536: note = Variant of B-Glucocerebrosidase
MEFSSPSREECPKPLSRVSIMAGSLTGLLLLQAVSWASGARPCIPKSFGYSSVVCVCNATYCDSVDPLTLPALGTFSRYESTRSGRRMELSMGPIQANRTGTGLLLTLQPEQKFQKVKGFGGAMTDAAALNILALSPPAQNLLLKSYFSTEGIEYNIIRVPMASCDFSIRTYTYADTPDDFQLHNFSLPEEDTKWKIPLIHRALQLSQRPVSLFASPWTSPTWLKTNGAYNGKGSLKGQPGDIYHQTWARYFVKFLDAYAEHGLQFWAVTAENEPSAGLLSGYPFQCLGFTPEHQRDFIARDLGPTLANSTHHNVRLLILDDQRLLLPHWAKVVLTNPEAAKYVHGIAVHWYLDFLAPAKWTLGETHRLFPNTTLFASEACVGSKFWEQSVRLGSWDRGMQYSHSIITNLLYHVVGWTDWNLALNPEGGPNWVRNFVDSPIIVDITKDTFYKQPMFYHLGHFSKFIPEGSTRVGLVASQKNDLDAVALLHPDGSAVVVVLNRSSKDVPLTIKDPAVGFLETISPGYSIHTYLWRRQ

SEQ ID NO: 1215 - DNA, 1608 bp, synthetic construct
  misc_feature 1..1608: note = Variant of B-Glucocerebrosidase
  source 1..1608: mol_type = other DNA
atggagttttcttctcctagtagagaagaatgccccaagccactgagcagggtgagcatcatggctggatccctcacagggctgcttcttttgcaggcagtctcatgggcctctggagccaggccctgtattcccaagtcattcggctactcctcagtggtgtgtgtatgcaatgccacctattgtgacagtgtcgatcctctcactctccctgctctgggtaccttctcccggtatgagagcacaagaagtggaagacgcatggagctctcaatgggccctatacaggctaaccgcactgggacaggtctgctgctgaccctccaacctgaacagaagtttcagaaagtcaagggatttggaggagccatgactgatgcagcagcactcaacatcttggccctgtctccaccagcccagaacctgctgttgaagtcctacttctcagaggaggggattgagtacaacatcatccgggttcccatggctagctgtgacttctccattaggacctatacatacgctgacacccccgatgattttcagctccataatttcagtctccctgaagaagacaccaaatggaagatacctctgattcacagagccttgcaaatctcccaaaggccagtgagcctcttcgcttctccctggactagtcctacatggctgaagactaatggtgcttacaatgggaagggctccctgaaaggacagccaggtgacatatatcatcagacatgggcccgctactttgtgaaattccttgatgcctatgcagagcacgggctccaattctgggcagtcaccgcagaaaacgagccctcagctgggctgctgtctggctacccctttcagtgcttgggctttactcctgagcatcaacgggacttcattgcccgggatttggggccaacactggccaacagcacccaccacaatgtaagactcctcattctggatgaccagaggctgctgctccctcattgggccaaggtggtgttgacaaacccagaagctgccaaatatgttcatggcatcgctgtccactggtacctggattttttggcccctgccaagtggactctgggagagacccacagactcttccccaataccacactgtttgcatcagaagcctgcgtggggagcaaattctgggagcagtctgttaggctgggttcctgggatcggggcatgcaatattcccatagtataataactaacctcctctaccacgtggtaggatggacagactggaatctggctttgaacccagaaggaggccccaattgggtgcgcaactttgttgacagccccatcattgtggatatcacaaaggacaccttctacaaacagcctatgttctatcatctggggcactttagcaagttcattccagagggttccactagagtaggcttggttgcctcacagaagaatgatctggatgctgtggcactcctgcatcctgacgggagtgcagtggtggtagtactgaacaggtctagcaaagatgttcccttgactatcaaagacccagctgtgggctttctggaaaccatttcccctggatactctatccacacctatctctggagaagacag

SEQ ID NO: 1216 - protein, 536 aa, synthetic construct
  REGION 1..536: note = Variant of B-Glucocerebrosidase
MEFSSPSREECPKPLSRVSIMAGSLTGLLLLQAVSWASGARPCIPKSFGYSSVVCVCNATYCDSVDPLTLPALGTFSRYESTRSGRRMELSMGPIQANRTGTGLLLTLQPEQKFQKVKGFGGAMTDAAALNILALSPPAQNLLLKSYFSEEGIEYNIIRVPMASCDFSIRTYTYADTPDDFQLHNFSLPEEDTKWKIPLIHRALQISQRPVSLFASPWTSPTWLKTNGAYNGKGSLKGQPGDIYHQTWARYFVKFLDAYAEHGLQFWAVTAENEPSAGLLSGYPFQCLGFTPEHQRDFIARDLGPTLANSTHHNVRLLILDDQRLLLPHWAKVVLTNPEAAKYVHGIAVHWYLDFLAPAKWTLGETHRLFPNTTLFASEACVGSKFWEQSVRLGSWDRGMQYSHSIITNLLYHVVGWTDWNLALNPEGGPNWVRNFVDSPIIVDITKDTFYKQPMFYHLGHFSKFIPEGSTRVGLVASQKNDLDAVALLHPDGSAVVVVLNRSSKDVPLTIKDPAVGFLETISPGYSIHTYLWRRQ

SEQ ID NO: 1217 - DNA, 1608 bp, synthetic construct
  misc_feature 1..1608: note = Variant of B-Glucocerebrosidase
  source 1..1608: mol_type = other DNA
atggagttttcttctcctagtagagaagaatgccccaagccactgagcagggtgagcatcatggctggatccctcacagggctgcttcttttgcaggcagtctcatgggcctctggagccaggccctgtattcccaagtcattcggctactcctcagtggtgtgtgtatgcaatgccacctattgtgacagtgtcgatcctctcactctccctgctctgggtaccttctcccggtatgagagcacaagaagtggaagacgcatggagctctcaatgggccctatagaggctaaccgcactgggacaggtctgctgctgaccctccaacctgaacagaagtttcagaaagtcaagggatttggaggagccatgactgatgcagcagcactcaacatcttggccctgtctccaccagcccagaacctgctgttgaagtcctacttctcagaggaggggattgagtacaacatcatccgggttcccatggctagctgtgacttctccattaggacctatacatacgctgacacccccgatgattttcagctccataatttcagtctccctgaagaagacacccagtggaagatacctctgattcacagagccttgcaactgtcccaaaggccagtgagcctcttcgcttctccctggactagtcctacatggctgaagactaatggtgcttacaatgggaagggctccctgaaaggacagccaggtgacatatatcatcagacatgggcccgctactttgtgaaattccttgatgcctatgcagagcacgggctccaattctgggcagtcaccgcagaaaacgagccctcagctgggctgctgtctggctacccctttcagtgcttgggctttactcctgagcatcaacgggacttcattgcccgggatttggggccaacactggccaacagcacccaccacaatgtaagactcctcattctggatgaccagaggctgctgctccctcattgggccaaggtggtgttgacaaacccagaagctgccaaatatgttcatggcatcgctgtccactggtacctggattttttggcccctgccaagtggactctgggagagacccacagactcttccccaataccacactgtttgcatcagaagcctgcgctgggagcaaattctgggagcagtctgttaggctgggttcctgggatcggggcatgcaatattcccatagtataatagagaacctcctctaccacgtggtaggatggacagactggaatctggctttgaacccagaaggaggccccaattgggtgcgcaactttgttgacagccccatcattgtggatatcacaaaggacaccttctacaaacagcctatgttctatcatctggggcactttagcaagttcattccagagggttccactagagtaggcttggttgcctcacagaagaatgatctggaagctgtggcactcctgcatcctgacgggagtgcagtggtggtagtactgaacaggtctagcaaagatgttcccttgactatcaaagacccagctgtgggctttctggaaaccatttcccctggatactctatccacacctatctctggagaagacag

SEQ ID NO: 1218 - protein, 536 aa, synthetic construct
  REGION 1..536: note = Variant of B-Glucocerebrosidase
MEFSSPSREECPKPLSRVSIMAGSLTGLLLLQAVSWASGARPCIPKSFGYSSVVCVCNATYCDSVDPLTLPALGTFSRYESTRSGRRMELSMGPIEANRTGTGLLLTLQPEQKFQKVKGFGGAMTDAAALNILALSPPAQNLLLKSYFSEEGIEYNIIRVPMASCDFSIRTYTYADTPDDFQLHNFSLPEEDTQWKIPLIHRALQLSQRPVSLFASPWTSPTWLKTNGAYNGKGSLKGQPGDIYHQTWARYFVKFLDAYAEHGLQFWAVTAENEPSAGLLSGYPFQCLGFTPEHQRDFIARDLGPTLANSTHHNVRLLILDDQRLLLPHWAKVVLTNPEAAKYVHGIAVHWYLDFLAPAKWTLGETHRLFPNTTLFASEACAGSKFWEQSVRLGSWDRGMQYSHSIIENLLYHVVGWTDWNLALNPEGGPNWVRNFVDSPIIVDITKDTFYKQPMFYHLGHFSKFIPEGSTRVGLVASQKNDLEAVALLHPDGSAVVVVLNRSSKDVPLTIKDPAVGFLETISPGYSIHTYLWRRQ

SEQ ID NO: 1219 - DNA, 1608 bp, synthetic construct
  misc_feature 1..1608: note = Variant of B-Glucocerebrosidase
  source 1..1608: mol_type = other DNA
atggagttttcttctcctagtagagaagaatgccccaagccactgagcagggtgagcatcatggctggatccctcacagggctgcttcttttgcaggcagtctcatgggcctctggagccaggccctgtattcccaagtcattcggctactcctcagtggtgtgtgtatgcaatgccacctattgtgacagtgtcgatcctctcactctccctgctctgggtaccttctcccggtatgagagcacaagaagtggaagacgcatggagctctcaatgggccctatacaggctaaccgcactgggacaggtctgctgctgaccctccaacctgaacagaagtttcagaaagtcaagggatttggaggagccatgactgatgcagcagcactcaacatcttggccctgtctccaccagcccagaacctgctgttgaagtcctacttctcagaggaggggattgagtacaacatcatccgggttcccatggctagctgtgacttctccattaggacctatacatacgctgacacccccgatgattttcagctccataatttcagtctccctgaagaagacaccaaatggaagatacctctgattcacagagccttgcaactgtcccaaaggccagtgagcctcttcgcttctccctggactagtcctacatggctgaagactaatggtgcttacaatgggaagggctccctgaaaggacagccaggtgacatatatcatcagacatgggcccgctactttgtgaaattccttgatgcctatgcagagcacgggctccaattctgggcagtcaccgcagaaaacgagccctcagctgggctgctgtctggctacccctttcagtgcttgggctttactcctgagcatcaacgggacttcattgcccgggatttggggccaacactggccaacagcacccaccacaatgtaagactcctcattctggatgaccagaggctgctgctccctcattgggccaaggtggtgttgacaaacccagaagctgccaaatatgttcatggcatcgctgtccactggtacctggattttttggcccctcctaagtggactctgggagagacccacagactcttccccaataccacactgtttgcatcagaagcctgcgctgggagcaaattctgggagcagtctgttaggctgggttcctgggatcggggcatgcaatattcccatagtataatagagaacctcctctggcacgtggtaggatggacagactggaatctggctttgaacccagaaggaggccccaattgggtgcgcaactttgttgacagccccatcattgtggatatcacaaaggacaccttctacaaacagcctatgttctatcatctggggcactttagcaagttcattccagagggttccactagagtaggcttggttgcctcacagaagaatgatctggatgctgtggcactcctgcatcctgacgggaccggggtggtggtagtactgaacaggtctagcaaagatgttcccttgactatcaaagacccagctgtgggctttctggaaaccatttcccctggatactctatccacacctatctctggagaagacag

SEQ ID NO: 1220 - protein, 536 aa, synthetic construct
  REGION 1..536: note = Variant of B-Glucocerebrosidase
MEFSSPSREECPKPLSRVSIMAGSLTGLLLLQAVSWASGARPCIPKSFGYSSVVCVCNATYCDSVDPLTLPALGTFSRYESTRSGRRMELSMGPIQANRTGTGLLLTLQPEQKFQKVKGFGGAMTDAAALNILALSPPAQNLLLKSYFSEEGIEYNIIRVPMASCDFSIRTYTYADTPDDFQLHNFSLPEEDTKWKIPLIHRALQLSQRPVSLFASPWTSPTWLKTNGAYNGKGSLKGQPGDIYHQTWARYFVKFLDAYAEHGLQFWAVTAENEPSAGLLSGYPFQCLGFTPEHQRDFIARDLGPTLANSTHHNVRLLILDDQRLLLPHWAKVVLTNPEAAKYVHGIAVHWYLDFLAPPKWTLGETHRLFPNTTLFASEACAGSKFWEQSVRLGSWDRGMQYSHSIIENLLWHVVGWTDWNLALNPEGGPNWVRNFVDSPIIVDITKDTFYKQPMFYHLGHFSKFIPEGSTRVGLVASQKNDLDAVALLHPDGTGVVVVLNRSSKDVPLTIKDPAVGFLETISPGYSIHTYLWRRQ

SEQ ID NO: 1221 - DNA, 1608 bp, synthetic construct
  misc_feature 1..1608: note = Variant of B-Glucocerebrosidase
  source 1..1608: mol_type = other DNA
atggagttttcttctcctagtagagaagaatgccccaagccactgagcagggtgagcatcatggctggatccctcacagggctgcttcttttgcaggcagtctcatgggcctctggagccaggccctgtattcccaagtcattcggctactcctcagtggtgtgtgtatgcaatgccacctattgtgacagtgtcgatcctctcactctccctgctctgggtaccttctcccggtatgagagcacaagaagtggaagacgcatggagctctcacagggccctatagaggctaaccgcactgggacaggtctgctgctgaccctccaacctgaacagaagtttcagaaagtcaagggatttggaggagccatgactgatgcagcagcactcaacatcttggccctgtctccaccagcccagaacctgctgttgaagtcctacttctcagaggaggggattgagtacaacatcatccgggttcccatggctagctgtgacttctccattaggacctatacatacgatgacacccccgatgattttagcctccataatttcagtctccctgaagaagacaccaaatggaagatacctctgattcacagagccttgcaactgtcccaaaggccagtgagcctcttcgcttctccctggactagtcctacatggctgaagactaatggtgcttacaatgggaagggctccctgaaaggacagccaggtgacatatatcatcagacatgggcccgctactttgtgaaattccttgatgcctatgcagagcacgggctccaattctgggcagtcaccgcagaaaacgagccctcagctgggctgctgtctggctacccctttcagtgcttgggctttactcctgagcatcaacgggacttcattgcccgggatttggggccaacactggccaacagcacccaccacaatgtaagactcctcattctggatgaccagaggctgctgctccctcattgggccaaggtggtgttgacaaacccagaagctgccaaatatgttcatggcatcgctgtccactggtacctggattttttggcccctgccaagtggactctgggagagacccacagactcttccccaataccacactgtttgcatcagaagcctgcgctgggagcaaattctgggagcagtctgttaggctgggttcctgggatcggggcatgcaatattcccatagtataatagagaacctcctctaccacgtggtaggatggacagactggaatctggctttgaacccagaaggaggccccaattgggtgcgcaactttgttgacagccccatcattgtggatatcacaaaggacaccttctacaaacagcctatgttctatcatctggggcactttagcaagttcattccagagggttccactagagtaggcttggttgcctcacagaagaatgatctggatgctgtggcactcctgcatcctgacgggagtgcagtggtggtagtactgaacaggtctagcaaagatgttcccttgactatcaaagacccagctgtgggctttctggaaaccatttcccctggatactctatccacacctatctctggagaagacag

SEQ ID NO: 1222 - protein, 536 aa, synthetic construct
  REGION 1..536: note = Variant of B-Glucocerebrosidase
MEFSSPSREECPKPLSRVSIMAGSLTGLLLLQAVSWASGARPCIPKSFGYSSVVCVCNATYCDSVDPLTLPALGTFSRYESTRSGRRMELSQGPIEANRTGTGLLLTLQPEQKFQKVKGFGGAMTDAAALNILALSPPAQNLLLKSYFSEEGIEYNIIRVPMASCDFSIRTYTYDDTPDDFSLHNFSLPEEDTKWKIPLIHRALQLSQRPVSLFASPWTSPTWLKTNGAYNGKGSLKGQPGDIYHQTWARYFVKFLDAYAEHGLQFWAVTAENEPSAGLLSGYPFQCLGFTPEHQRDFIARDLGPTLANSTHHNVRLLILDDQRLLLPHWAKVVLTNPEAAKYVHGIAVHWYLDFLAPAKWTLGETHRLFPNTTLFASEACAGSKFWEQSVRLGSWDRGMQYSHSIIENLLYHVVGWTDWNLALNPEGGPNWVRNFVDSPIIVDITKDTFYKQPMFYHLGHFSKFIPEGSTRVGLVASQKNDLDAVALLHPDGSAVVVVLNRSSKDVPLTIKDPAVGFLETISPGYSIHTYLWRRQ

SEQ ID NO: 1223 - DNA, 1608 bp, synthetic construct
  misc_feature 1..1608: note = Variant of B-Glucocerebrosidase
  source 1..1608: mol_type = other DNA
atggagttttcttctcctagtagagaagaatgccccaagccactgagcagggtgagcatcatggctggatccctcacagggctgcttcttttgcaggcagtctcatgggcctctggagccaggccctgtattcccaagtcattcggctactcctcagtggtgtgtgtatgcaatgccacctattgtgacagtgtcgatcctctcactctccctgctctgggtaccttctcccggtatgagagcacaagaagtggaagacgcatggagctctcaatgggccctatagaggctaaccgcactgggacaggtctgctgctgaccctccaacctgaacagaagtttcagaaagtcaagggatttggaggagccatgactgatgcagcagcactcaacatcttggccctgtctccaccagcccagaacctgctgttgaagtcctacttctcagaggaggggattgagtacaacatcatccgggttcccatggctagctgtgacttctccattaggacctatacatacgctgacacccccgatgattttcagctccataatttcagtctccctgaagaagacaccaaatggaagatacctctgattcacagagccttgcaactgtcccaaaggccagtgagcctcttcgcttctccctggactagtcctacatggctgaagactaatggtgcttacaatgggaagggctccctgaaaggacagccaggtgacatatatcatcagacatgggcccgctactttgtgaaattccttgatgcctatgcagagcacgggctccaattctgggcagtcaccgcagaaaacgagccctcagctgggctgctgtctggctacccctttcagtgcttgggctttactcctgagcatcaacgggacttcattgcccgggatttggggccaacactggccaacagcacccaccacaatgtaagactcctcattctggatgaccagaggctgctgctccctcattgggccaaggtggtgttgacaaacccagaagctgccaaatatgttcatggcatcgctgtccactggtacctggattttttggcccctcctaagtggactctgggagagacccacagactcttccccaataccacactgtttgcatcagaagcctgcgctgggagcaaattctgggagcagtctgttaggctgggttcctgggatcggggcatgcaatattcccatagtataatagagaacctcctctaccacgtggtaggatggacagactggaatctggctttgaacccagaaggaggccccaattgggtgcgcaactttgttgacagccccatcattgtggatatcacaaaggacaccttctacaaacagcctatgttctatcatctggggcactttagcaagttcattccagagggttccactagagtaggcttggttgcctcacagaagaatgatctggaagctgtggcactcctgcatcctgacgggaccggggtggtggtagtactgaacaggtctagcaaagatgttcccttgactatcaaagacccagctgtgggctttctggaaaccatttcccctggatactctatccacacctatctctggagaagacag

SEQ ID NO: 1224 - protein, 536 aa, synthetic construct
  REGION 1..536: note = Variant of B-Glucocerebrosidase
MEFSSPSREECPKPLSRVSIMAGSLTGLLLLQAVSWASGARPCIPKSFGYSSVVCVCNATYCDSVDPLTLPALGTFSRYESTRSGRRMELSMGPIEANRTGTGLLLTLQPEQKFQKVKGFGGAMTDAAALNILALSPPAQNLLLKSYFSEEGIEYNIIRVPMASCDFSIRTYTYADTPDDFQLHNFSLPEEDTKWKIPLIHRALQLSQRPVSLFASPWTSPTWLKTNGAYNGKGSLKGQPGDIYHQTWARYFVKFLDAYAEHGLQFWAVTAENEPSAGLLSGYPFQCLGFTPEHQRDFIARDLGPTLANSTHHNVRLLILDDQRLLLPHWAKVVLTNPEAAKYVHGIAVHWYLDFLAPPKWTLGETHRLFPNTTLFASEACAGSKFWEQSVRLGSWDRGMQYSHSIIENLLYHVVGWTDWNLALNPEGGPNWVRNFVDSPIIVDITKDTFYKQPMFYHLGHFSKFIPEGSTRVGLVASQKNDLEAVALLHPDGTGVVVVLNRSSKDVPLTIKDPAVGFLETISPGYSIHTYLWRRQ

SEQ ID NO: 1225 - DNA, 1608 bp, synthetic construct
  misc_feature 1..1608: note = Variant of B-Glucocerebrosidase
  source 1..1608: mol_type = other DNA
atggagttttcttctcctagtagagaagaatgccccaagccactgagcagggtgagcatcatggctggatccctcacagggctgcttcttttgcaggcagtctcatgggcctctggagccaggccctgtattcccaagtcattcggctactcctcagtggtgtgtgtatgcaatgccacctattgtgacagtgtcgatcctctcactctccctgctctgggtaccttctcccggtatgagagcacaagaagtggaagacgcatggagctctcagagggccctatacaagctaaccgcactgggacaggtctgctgctgaccctccaacctgaacagaagtttcagaaagtcaagggatttggaggagccatgactgatgcagcagcactcaacatcttggccctgtctccaccagcccagaacctgctgttgaagtcctacttctcagaggaggggattgagtacaacatcatccgggttcccatggctagctgtgacttctccattaggacctatacatacgatgacacccccgatgattttcagctccataatttcagtctccctgaagaagacacccagtggaagatacctctgattcacagagccttgcaactgtcccaaaggccagtgagcctcttcgcttctccctggactagtcctacatggctgaagactaatggtgcttacaatgggaagggctccctgaaaggacagccaggtgacatatatcatcagacatgggcccgctactttgtgaaattccttgatgcctatgcagagcacgggctccaattctgggcagtcaccgcagaaaacgagccctcagctgggctgctgtctggctacccctttcagtgcttgggctttactcctgagcatcaacgggacttcattgcccgggatttggggccaacactggccaacagcacccaccacaatgtaagactcctcattctggatgaccagaggctgctgctccctcattgggccaaggtggtgttgacaaacccagaagctgccaaatatgttcatggcatcgctgtccactggtacctggattttttggcccctcctaagtggactctgggagagacccacagactcttccccaataccacactgtttgcatcagaagcctgcgctgggagcaaattctgggagcagtctgttaggctgggttcctgggatcggggcatgcaatattcccatagtataatagagaacctcctctaccacgtggtaggatggacagactggaatctggctttgaacccagaaggaggccccaattgggtgcgcaactttgttgacagccccatcattgtggatatcacaaaggacaccttctacaaacagcctatgttctatcatctggggcactttagcaagttcattccagagggttccactagagtaggcttggttgcctcacagaagaatgatctggatgctgtggcactcctgcatcctgacgggagtgcagtggtggtagtactgaacaggtctagcaaagatgttcccttgactatcaaagacccagctgtgggctttctggaaaccatttcccctggatactctatccacacctatctctggagaagacag

SEQ ID NO: 1226 - protein, 536 aa, synthetic construct
  REGION 1..536: note = Variant of B-Glucocerebrosidase
MEFSSPSREECPKPLSRVSIMAGSLTGLLLLQAVSWASGARPCIPKSFGYSSVVCVCNATYCDSVDPLTLPALGTFSRYESTRSGRRMELSEGPIQANRTGTGLLLTLQPEQKFQKVKGFGGAMTDAAALNILALSPPAQNLLLKSYFSEEGIEYNIIRVPMASCDFSIRTYTYDDTPDDFQLHNFSLPEEDTQWKIPLIHRALQLSQRPVSLFASPWTSPTWLKTNGAYNGKGSLKGQPGDIYHQTWARYFVKFLDAYAEHGLQFWAVTAENEPSAGLLSGYPFQCLGFTPEHQRDFIARDLGPTLANSTHHNVRLLILDDQRLLLPHWAKVVLTNPEAAKYVHGIAVHWYLDFLAPPKWTLGETHRLFPNTTLFASEACAGSKFWEQSVRLGSWDRGMQYSHSIIENLLYHVVGWTDWNLALNPEGGPNWVRNFVDSPIIVDITKDTFYKQPMFYHLGHFSKFIPEGSTRVGLVASQKNDLDAVALLHPDGSAVVVVLNRSSKDVPLTIKDPAVGFLETISPGYSIHTYLWRRQ

SEQ ID NO: 1227 - DNA, 1608 bp, synthetic construct
  misc_feature 1..1608: note = Variant of B-Glucocerebrosidase
  source 1..1608: mol_type = other DNA
atggagttttcttctcctagtagagaagaatgccccaagccactgagcagggtgagcatcatggctggatccctcacagggctgcttcttttgcaggcagtctcatgggcctctggagccaggccctgtattcccaagtcattcggctactcctcagtggtgtgtgtatgcaatgccacctattgtgacagtgtcgatcctctcactctccctgctctgggtaccttctcccggtatgagagcacaagaagtggaagacgcatggagctctcaatgggccctatacaagctaaccgcactgggacaggtctgctgctgaccctccaacctgaacagaagtttcagaaagtcaagggatttggaggagccatgactgatgcagcagcactcaacatcttggccctgtctccaccagcccagaacctgctgttgaagtcctacttctcagaggaggggattgagtacaacatcatccgggttcccatggctagctgtgacttctccattaggacctatacatacgctgacacccccgatgattttcagctccataatttcagtctccctgaagaagacaccaaatggaagatacctctgattcacagagccttgcaactgtcccaaaggccagtgagcctcttcgcttctccctggactagtcctacatggctgaagactaatggtgcttacaatgggaagggctccctgaaaggacagccaggtgacatatatcatcagacatgggcccgctactttgtgaaattccttgatgcctatgcagagcacgggctccaattctgggcagtcaccgcagaaaacgagccctcagctgggctgctgtctggctacccctttcagtgcttgggctttactcctgagcatcaacgggacttcattgcccgggatttggggccaacactggccaacagcacccaccacaatgtaagactcctcattctggatgaccagaggctgctgctccctcattgggccaaggtggtgttgacaaacccagaagctgccaaatatgttcatggcatcgctgtccactggtacctggattttttggcccctcctaagtggactctgggagagacccacagactcttccccaataccacactgtttgcatcagaagcctgcgctgggagcaaattctgggagcagtctgttaggctgggttcctgggatcggggcgaacaatattcccatagtataatagagaacctcctctggcacgtggtaggatggacagactggaatctggctttgaacccagaaggaggccccaattgggtgcgcaactttgttgacagccccatcattgtggatatcacaaaggacaccttctacaaacagcctatgttctatcatctggggcactttagcaagttcattccagagggttccactagagtaggcttggttgcctcacagaagaatgatctggatgctgtggcactcctgcatcctgacgggagtgcagtggtggtagtactgaacaggtctagcaaagatgttcccttgactatcaaagacccagctgtgggctttctggaaaccatttcccctggatactctatccacacctatctctggagaagacag

SEQ ID NO: 1228 - protein, 536 aa, synthetic construct
  REGION 1..536: note = Variant of B-Glucocerebrosidase
MEFSSPSREECPKPLSRVSIMAGSLTGLLLLQAVSWASGARPCIPKSFGYSSVVCVCNATYCDSVDPLTLPALGTFSRYESTRSGRRMELSMGPIQANRTGTGLLLTLQPEQKFQKVKGFGGAMTDAAALNILALSPPAQNLLLKSYFSEEGIEYNIIRVPMASCDFSIRTYTYADTPDDFQLHNFSLPEEDTKWKIPLIHRALQLSQRPVSLFASPWTSPTWLKTNGAYNGKGSLKGQPGDIYHQTWARYFVKFLDAYAEHGLQFWAVTAENEPSAGLLSGYPFQCLGFTPEHQRDFIARDLGPTLANSTHHNVRLLILDDQRLLLPHWAKVVLTNPEAAKYVHGIAVHWYLDFLAPPKWTLGETHRLFPNTTLFASEACAGSKFWEQSVRLGSWDRGEQYSHSIIENLLWHVVGWTDWNLALNPEGGPNWVRNFVDSPIIVDITKDTFYKQPMFYHLGHFSKFIPEGSTRVGLVASQKNDLDAVALLHPDGSAVVVVLNRSSKDVPLTIKDPAVGFLETISPGYSIHTYLWRRQ

SEQ ID NO: 1229 - DNA, 1608 bp, synthetic construct
  misc_feature 1..1608: note = Variant of B-Glucocerebrosidase
  source 1..1608: mol_type = other DNA
atggagttttcttctcctagtagagaagaatgccccaagccactgagcagggtgagcatcatggctggatccctcacagggctgcttcttttgcaggcagtctcatgggcctctggagccaggccctgtattcccaagtcattcggctactcctcagtggtgtgtgtatgcaatgccacctattgtgacagtgtcgatcctctcactctccctgctctgggtaccttctcccggtatgagagcacaagaagtggaagacgcatggagctctcacagggccctatagaggctaaccgcactgggacaggtctgctgctgaccctccaacctgaacagaagtttcagaaagtcaagggatttggaggagccatgactgatgcagcagcactcaacatcttggccctgtctccaccagcccagaacctgctgttgaagtcctacttctcagaggaggggattgagtacaacatcatccgggttcccatggctagctgtgacttctccattaggacctatacatacgctgacacccccgatgattttagcctccataatttcagtctccctgaagaagacaccaaatggaagatacctctgattcacagagccttgcaactgtcccaaaggccagtgagcctcttcgcttctccctggactagtcctacatggctgaagactaatggtgcttacaatgggaagggctccctgaaaggacagccaggtgacatatatcatcagacatgggcccgctactttgtgaaattccttgatgcctatgcagagcacgggctccaattctgggcagtcaccgcagaaaacgagccctcagctgggctgctgtctggctacccctttcagtgcttgggctttactcctgagcatcaacgggacttcattgcccgggatttggggccaacactggccaacagcacccaccacaatgtaagactcctcattctggatgaccagaggctgctgctccctcattgggccaaggtggtgttgacaaacccagaagctgccaaatatgttcatggcatcgctgtccactggtacctggattttttggcccctgccaagtggactctgggagagacccacagactcttccccaataccacactgtttgcatcagaagcctgcgctgggagcaaattctgggagcagtctgttaggctgggttcctgggatcggggcgaacaatattcccatagtataatagagaacctcctctaccacgtggtaggatggacagactggaatctggctttgaacccagaaggaggccccaattgggtgcgcaactttgttgacagccccatcattgtggatatcacaaaggacaccttctacaaacagcctatgttctatcatctggggcactttagcaagttcattccagagggttccactagagtaggcttggttgcctcacagaagaatgatctggaagctgtggcactcctgcatcctgacgggagtgcagtggtggtagtactgaacaggtctagcaaagatgttcccttgactatcaaagacccagctgtgggctttctggaaaccatttcccctggatactctatccacacctatctctggagaagacag

SEQ ID NO: 1230 - protein, 536 aa, synthetic construct
  REGION 1..536: note = Variant of B-Glucocerebrosidase
MEFSSPSREECPKPLSRVSIMAGSLTGLLLLQAVSWASGARPCIPKSFGYSSVVCVCNATYCDSVDPLTLPALGTFSRYESTRSGRRMELSQGPIEANRTGTGLLLTLQPEQKFQKVKGFGGAMTDAAALNILALSPPAQNLLLKSYFSEEGIEYNIIRVPMASCDFSIRTYTYADTPDDFSLHNFSLPEEDTKWKIPLIHRALQLSQRPVSLFASPWTSPTWLKTNGAYNGKGSLKGQPGDIYHQTWARYFVKFLDAYAEHGLQFWAVTAENEPSAGLLSGYPFQCLGFTPEHQRDFIARDLGPTLANSTHHNVRLLILDDQRLLLPHWAKVVLTNPEAAKYVHGIAVHWYLDFLAPAKWTLGETHRLFPNTTLFASEACAGSKFWEQSVRLGSWDRGEQYSHSIIENLLYHVVGWTDWNLALNPEGGPNWVRNFVDSPIIVDITKDTFYKQPMFYHLGHFSKFIPEGSTRVGLVASQKNDLEAVALLHPDGSAVVVVLNRSSKDVPLTIKDPAVGFLETISPGYSIHTYLWRRQ

SEQ ID NO: 1231 - DNA, 1608 bp, synthetic construct
  misc_feature 1..1608: note = Variant of B-Glucocerebrosidase
  source 1..1608: mol_type = other DNA
atggagttttcttctcctagtagagaagaatgccccaagccactgagcagggtgagcatcatggctggatccctcacagggctgcttcttttgcaggcagtctcatgggcctctggagccaggccctgtattcccaagtcattcggctactcctcagtggtgtgtgtatgcaatgccacctattgtgacagtgtcgatcctctcactctccctgctctgggtaccttctcccggtatgagagcacaagaagtggaagacgcatggagctctcacagggccctatagaggctaaccgcactgggacaggtctgctgctgaccctccaacctgaacagaagtttcagaaagtcaagggatttggaggagccatgactgatgcagcagcactcaacatcttggccctgtctccaccagcccagaacctgctgttgaagtcctacttctcagaggaggggattgagtacaacatcatccgggttcccatggctagctgtgacttctccattaggacctatacatacgctgacacccccgatgattttcagctccataatttcagtctccctgaagaagacaccaaatggaagatacctctgattcacagagccttgcaactgtcccaaaggccagtgagcctcttcgcttctccctggactagtcctacatggctgaagactaatggtgcttacaatgggaagggctccctgaaaggacagccaggtgacatatatcatcagacatgggcccgctactttgtgaaattccttgatgcctatgcagagcacgggctccaattctgggcagtcaccgcagaaaacgagccctcagctgggctgctgtctggctacccctttcagtgcttgggctttactcctgagcatcaacgggacttcattgcccgggatttggggccaacactggccaacagcacccaccacaatgtaagactcctcattctggatgaccagaggctgctgctccctcattgggccaaggtggtgttgacaaacccagaagctgccaaatatgttcatggcatcgctgtccactggtacctggattttttggcccctgccaagtggactctgggagagacccacagactcttccccaataccacactgtttgcatcagaagcctgcgctgggagcaaattctgggagcagtctgttaggctgggttcctgggatcggggcatgcaatattcccatagtataatagagaacctcctctaccacgtggtaggatggacagactggaatctggctttgaacccagaaggaggccccaattgggtgcgcaactttgttgacagccccatcattgtggatatcacaaaggacaccttctacaaacagcctatgttctatcatctggggcactttagcaagttcattccagagggttccactagagtaggcttggttgcctcacagaagaatgatctggatgctgtggcactcctgcatcctgacgggaccggggtggtggtagtactgaacaggtctagcaaagatgttcccttgactatcaaagacccagctgtgggctttctggaaaccatttcccctggatactctatccacacctatctctggagaagacag

SEQ ID NO: 1232 - protein, 536 aa, synthetic construct
  REGION 1..536: note = Variant of B-Glucocerebrosidase
MEFSSPSREECPKPLSRVSIMAGSLTGLLLLQAVSWASGARPCIPKSFGYSSVVCVCNATYCDSVDPLTLPALGTFSRYESTRSGRRMELSQGPIEANRTGTGLLLTLQPEQKFQKVKGFGGAMTDAAALNILALSPPAQNLLLKSYFSEEGIEYNIIRVPMASCDFSIRTYTYADTPDDFQLHNFSLPEEDTKWKIPLIHRALQLSQRPVSLFASPWTSPTWLKTNGAYNGKGSLKGQPGDIYHQTWARYFVKFLDAYAEHGLQFWAVTAENEPSAGLLSGYPFQCLGFTPEHQRDFIARDLGPTLANSTHHNVRLLILDDQRLLLPHWAKVVLTNPEAAKYVHGIAVHWYLDFLAPAKWTLGETHRLFPNTTLFASEACAGSKFWEQSVRLGSWDRGMQYSHSIIENLLYHVVGWTDWNLALNPEGGPNWVRNFVDSPIIVDITKDTFYKQPMFYHLGHFSKFIPEGSTRVGLVASQKNDLDAVALLHPDGTGVVVVLNRSSKDVPLTIKDPAVGFLETISPGYSIHTYLWRRQ

SEQ ID NO: 1233 - DNA, 1608 bp, synthetic construct
  misc_feature 1..1608: note = Variant of B-Glucocerebrosidase
  source 1..1608: mol_type = other DNA
atggagttttcttctcctagtagagaagaatgccccaagccactgagcagggtgagcatcatggctggatccctcacagggctgcttcttttgcaggcagtctcatgggcctctggagccaggccctgtattcccaagtcattcggctactcctcagtggtgtgtgtatgcaatgccacctattgtgacagtgtcgatcctctcactctccctgctctgggtaccttctcccggtatgagagcacaagaagtggaagacgcatggagctctcacagggccctatagaggctaaccgcactgggacaggtctgctgctgaccctccaacctgaacagaagtttcagaaagtcaagggatttggaggagccatgactgatgcagcagcactcaacatcttggccctgtctccaccagcccagaacctgctgttgaagtcctacttctcagaggaggggattgagtacaacatcatccgggttcccatggctagctgtgacttctccattaggacctatacatacgatgacacccccgatgattttcagctccataatttcagtctccctgaagaagacaccaaatggaagatacctctgattcacagagccttgcaactgtcccaaaggccagtgagcctcttcgcttctccctggactagtcctacatggctgaagactaatggtgcttacaatgggaagggctccctgaaaggacagccaggtgacatatatcatcagacatgggcccgctactttgtgaaattccttgatgcctatgcagagcacgggctccaattctgggcagtcaccgcagaaaacgagccctcagctgggctgctgtctggctacccctttcagtgcttgggctttactcctgagcatcaacgggacttcattgcccgggatttggggccaacactggccaacagcacccaccacaatgtaagactcctcattctggatgaccagaggctgctgctccctcattgggccaaggtggtgttgacaaacccagaagctgccaaatatgttcatggcatcgctgtccactggtacctggattttttggcccctgccaagtggactctgggagagacccacagactcttccccaataccacactgtttgcatcagaagcctgcgctgggagcaaattctgggagcagtctgttaggctgggttcctgggatcggggcatgcaatattcccatagtataatagagaacctcctctaccacgtggtaggatggacagactggaatctggctttgaacccagaaggaggccccaattgggtgcgcaactttgttgacagccccatcattgtggatatcacaaaggacaccttctacaaacagcctatgttctatcatctggggcactttagcaagttcattccagagggttccactagagtaggcttggttgcctcacagaagaatgatctggatgctgtggcactcctgcatcctgacgggaccggggtggtggtagtactgaacaggtctagcaaagatgttcccttgactatcaaagacccagctgtgggctttctggaaaccatttcccctggatactctatccacacctatctctggagaagacag

SEQ ID NO: 1234 - protein, 536 aa, synthetic construct
  REGION 1..536: note = Variant of B-Glucocerebrosidase
MEFSSPSREECPKPLSRVSIMAGSLTGLLLLQAVSWASGARPCIPKSFGYSSVVCVCNATYCDSVDPLTLPALGTFSRYESTRSGRRMELSQGPIEANRTGTGLLLTLQPEQKFQKVKGFGGAMTDAAALNILALSPPAQNLLLKSYFSEEGIEYNIIRVPMASCDFSIRTYTYDDTPDDFQLHNFSLPEEDTKWKIPLIHRALQLSQRPVSLFASPWTSPTWLKTNGAYNGKGSLKGQPGDIYHQTWARYFVKFLDAYAEHGLQFWAVTAENEPSAGLLSGYPFQCLGFTPEHQRDFIARDLGPTLANSTHHNVRLLILDDQRLLLPHWAKVVLTNPEAAKYVHGIAVHWYLDFLAPAKWTLGETHRLFPNTTLFASEACAGSKFWEQSVRLGSWDRGMQYSHSIIENLLYHVVGWTDWNLALNPEGGPNWVRNFVDSPIIVDITKDTFYKQPMFYHLGHFSKFIPEGSTRVGLVASQKNDLDAVALLHPDGTGVVVVLNRSSKDVPLTIKDPAVGFLETISPGYSIHTYLWRRQ

SEQ ID NO: 1235 - DNA, 1608 bp, synthetic construct
  misc_feature 1..1608: note = Variant of B-Glucocerebrosidase
  source 1..1608: mol_type = other DNA
atggagttttcttctcctagtagagaagaatgccccaagccactgagcagggtgagcatcatggctggatccctcacagggctgcttcttttgcaggcagtctcatgggcctctggagccaggccctgtattcccaagtcattcggctactcctcagtggtgtgtgtatgcaatgccacctattgtgacagtgtcgatcctctcactctccctgctctgggtaccttctcccggtatgagagcacaagaagtggaagacgcatggagctctcaatgggccctatagaggctaaccgcactgggacaggtctgctgctgaccctccaacctgaacagaagtttcagaaagtcaagggatttggaggagccatgactgatgcagcagcactcaacatcttggccctgtctccaccagcccagaacctgctgttgaagtcctacttctcagaggaggggattgagtacaacatcatccgggttcccatggctagctgtgacttctccattaggacctatacatacgctgacacccccgatgattttagcctccataatttcagtctccctgaagaagacaccaaatggaagatacctctgattcacagagccttgcaactgtcccaaaggccagtgagcctcttcgcttctccctggactagtcctacatggctgaagactaatggtgcttacaatgggaagggctccctgaaaggacagccaggtgacatatatcatcagacatgggcccgctactttgtgaaattccttgatgcctatgcagagcacgggctccaattctgggcagtcaccgcagaaaacgagccctcagctgggctgctgtctggctacccctttcagtgcttgggctttactcctgagcatcaacgggacttcattgcccgggatttggggccaacactggccaacagcacccaccacaatgtaagactcctcattctggatgaccagaggctgctgctccctcattgggccaaggtggtgttgacaaacccagaagctgccaaatatgttcatggcatcgctgtccactggtacctggattttttggcccctcctaagtggactctgggagagacccacagactcttccccaataccacactgtttgcatcagaagcctgcgctgggagcaaattctgggagcagtctgttaggctgggttcctgggatcggggcatgcaatattcccatagtataatagagaacctcctctaccacgtggtaggatggacagactggaatctggctttgaacccagaaggaggccccaattgggtgcgcaactttgttgacagccccatcattgtggatatcacaaaggacaccttctacaaacagcctatgttctatcatctggggcactttagcaagttcattccagagggttccactagagtaggcttggttgcctcacagaagaatgatctggaagctgtggcactcctgcatcctgacgggagtgcagtggtggtagtactgaacaggtctagcaaagatgttcccttgactatcaaagacccagctgtgggctttctggaaaccatttcccctggatactctatccacacctatctctggagaagacag

SEQ ID NO: 1236 - protein, 536 aa, synthetic construct
  REGION 1..536: note = Variant of B-Glucocerebrosidase
MEFSSPSREECPKPLSRVSIMAGSLTGLLLLQAVSWASGARPCIPKSFGYSSVVCVCNATYCDSVDPLTLPALGTFSRYESTRSGRRMELSMGPIEANRTGTGLLLTLQPEQKFQKVKGFGGAMTDAAALNILALSPPAQNLLLKSYFSEEGIEYNIIRVPMASCDFSIRTYTYADTPDDFSLHNFSLPEEDTKWKIPLIHRALQLSQRPVSLFASPWTSPTWLKTNGAYNGKGSLKGQPGDIYHQTWARYFVKFLDAYAEHGLQFWAVTAENEPSAGLLSGYPFQCLGFTPEHQRDFIARDLGPTLANSTHHNVRLLILDDQRLLLPHWAKVVLTNPEAAKYVHGIAVHWYLDFLAPPKWTLGETHRLFPNTTLFASEACAGSKFWEQSVRLGSWDRGMQYSHSIIENLLYHVVGWTDWNLALNPEGGPNWVRNFVDSPIIVDITKDTFYKQPMFYHLGHFSKFIPEGSTRVGLVASQKNDLEAVALLHPDGSAVVVVLNRSSKDVPLTIKDPAVGFLETISPGYSIHTYLWRRQ

SEQ ID NO: 1237 - DNA, 1608 bp, synthetic construct
  misc_feature 1..1608: note = Variant of B-Glucocerebrosidase
  source 1..1608: mol_type = other DNA
atggagttttcttctcctagtagagaagaatgccccaagccactgagcagggtgagcatcatggctggatccctcacagggctgcttcttttgcaggcagtctcatgggcctctggagccaggccctgtattcccaagtcattcggctactcctcagtggtgtgtgtatgcaatgccacctattgtgacagtgtcgatcctctcactctccctgctctgggtaccttctcccggtatgagagcacaagaagtggaagacgcatggagctctcagagggccctatagaggctaaccgcactgggacaggtctgctgctgaccctccaacctgaacagaagtttcagaaagtcaagggatttggaggagccatgactgatgcagcagcactcaacatcttggccctgtctccaccagcccagaacctgctgttgaagtcctacttctcagaggaggggattgagtacaacatcatccgggttcccatggctagctgtgacttctccattaggacctatacatacgctgacacccccgatgattttcagctccataatttcagtctccctgaagaagacaccaaatggaagatacctctgattcacagagccttgcaactgtcccaaaggccagtgagcctcttcgcttctccctggactagtcctacatggctgaagactaatggtgcttacaatgggaagggctccctgaaaggacagccaggtgacatatatcatcagacatgggcccgctactttgtgaaattccttgatgcctatgcagagcacgggctccaattctgggcagtcaccgcagaaaacgagccctcagctgggctgctgtctggctacccctttcagtgcttgggctttactcctgagcatcaacgggacttcattgcccgggatttggggccaacactggccaacagcacccaccacaatgtaagactcctcattctggatgaccagaggctgctgctccctcattgggccaaggtggtgttgacaaacccagaagctgccaaatatgttcatggcatcgctgtccactggtacctggattttttggcccctgccaagtggactctgggagagacccacagactcttccccaataccacactgtttgcatcagaagcctgcgctgggagcaaattctgggagcagtctgttaggctgggttcctgggatcggggcatgcaatattcccatagtataatagagaacctcctctaccacgtggtaggatggacagactggaatctggctttgaacccagaaggaggccccaattgggtgcgcaactttgttgacagccccatcattgtggatatcacaaaggacaccttctacaaacagcctatgttctatcatctggggcactttagcaagttcattccagagggttccactagagtaggcttggttgcctcacagaagaatgatctggatgctgtggcactcctgcatcctgacgggagtgcagtggtggtagtactgaacaggtctagcaaagatgttcccttgactatcaaagacccagctgtgggctttctggaaaccatttcccctggatactctatccacacctatctctggagaagacag

SEQ ID NO: 1238 - protein, 536 aa, synthetic construct
  REGION 1..536: note = Variant of B-Glucocerebrosidase
MEFSSPSREECPKPLSRVSIMAGSLTGLLLLQAVSWASGARPCIPKSFGYSSVVCVCNATYCDSVDPLTLPALGTFSRYESTRSGRRMELSEGPIEANRTGTGLLLTLQPEQKFQKVKGFGGAMTDAAALNILALSPPAQNLLLKSYFSEEGIEYNIIRVPMASCDFSIRTYTYADTPDDFQLHNFSLPEEDTKWKIPLIHRALQLSQRPVSLFASPWTSPTWLKTNGAYNGKGSLKGQPGDIYHQTWARYFVKFLDAYAEHGLQFWAVTAENEPSAGLLSGYPFQCLGFTPEHQRDFIARDLGPTLANSTHHNVRLLILDDQRLLLPHWAKVVLTNPEAAKYVHGIAVHWYLDFLAPAKWTLGETHRLFPNTTLFASEACAGSKFWEQSVRLGSWDRGMQYSHSIIENLLYHVVGWTDWNLALNPEGGPNWVRNFVDSPIIVDITKDTFYKQPMFYHLGHFSKFIPEGSTRVGLVASQKNDLDAVALLHPDGSAVVVVLNRSSKDVPLTIKDPAVGFLETISPGYSIHTYLWRRQ

SEQ ID NO: 1239 - DNA, 1608 bp, synthetic construct
  misc_feature 1..1608: note = Variant of B-Glucocerebrosidase
  source 1..1608: mol_type = other DNA
atggagttttcttctcctagtagagaagaatgccccaagccactgagcagggtgagcatcatggctggatccctcacagggctgcttcttttgcaggcagtctcatgggcctctggagccaggccctgtattcccaagtcattcggctactcctcagtggtgtgtgtatgcaatgccacctattgtgacagtgtcgatcctctcactctccctgctctgggtaccttctcccggtatgagagcacaagaagtggaagacgcatggagctctcacagggccctatacaagctaaccgcactgggacaggtctgctgctgaccctccaacctgaacagaagtttcagaaagtcaagggatttggaggagccatgactgatgcagcagcactcaacatcttggccctgtctccaccagcccagaacctgctgttgaagtcctacttctcagaggaggggattgagtacaacatcatccgggttcccatggctagctgtgacttctccattaggacctatacatacgctgacacccccgatgattttcagctccataatttcagtctccctgaagaagacaccaaatggaagatacctctgattcacagagccttgcaactgtcccaaaggccagtgagcctcttcgcttctccctggactagtcctacatggctgaagactaatggtgcttacaatgggaagggctccctgaaaggacagccaggtgacatatatcatcagacatgggcccgctactttgtgaaattccttgatgcctatgcagagcacgggctccaattctgggcagtcaccgcagaaaacgagccctcagctgggctgctgtctggctacccctttcagtgcttgggctttactcctgagcatcaacgggacttcattgcccgggatttggggccaacactggccaacagcacccaccacaatgtaagactcctcattctggatgaccagaggctgctgctccctcattgggccaaggtggtgttgacaaacccagaagctgccaaatatgttcatggcatcgctgtccactggtacctggattttttggcccctgccaagtggactctgggagagacccacagactcttccccaataccacactgtttgcatcagaagcctgcgctgggagcaaattctgggagcagtctgttaggctgggttcctgggatcggggcatgcaatattcccatagtataatagagaacctcctctaccacgtggtaggatggacagactggaatctggctttgaacccagaaggaggccccaattgggtgcgcaactttgttgacagccccatcattgtggatatcacaaaggacaccttctacaaacagcctatgttctatcatctggggcactttagcaagttcattccagagggttccactagagtaggcttggttgcctcacagaagaatgatctggatgctgtggcactcctgcatcctgacgggaccggggtggtggtagtactgaacaggtctagcaaagatgttcccttgactatcaaagacccagctgtgggctttctggaaaccatttcccctggatactctatccacacctatctctggaaaagacag

SEQ ID NO: 1240 - protein, 536 aa, synthetic construct
  REGION 1..536: note = Variant of B-Glucocerebrosidase
MEFSSPSREECPKPLSRVSIMAGSLTGLLLLQAVSWASGARPCIPKSFGYSSVVCVCNATYCDSVDPLTLPALGTFSRYESTRSGRRMELSQGPIQANRTGTGLLLTLQPEQKFQKVKGFGGAMTDAAALNILALSPPAQNLLLKSYFSEEGIEYNIIRVPMASCDFSIRTYTYADTPDDFQLHNFSLPEEDTKWKIPLIHRALQLSQRPVSLFASPWTSPTWLKTNGAYNGKGSLKGQPGDIYHQTWARYFVKFLDAYAEHGLQFWAVTAENEPSAGLLSGYPFQCLGFTPEHQRDFIARDLGPTLANSTHHNVRLLILDDQRLLLPHWAKVVLTNPEAAKYVHGIAVHWYLDFLAPAKWTLGETHRLFPNTTLFASEACAGSKFWEQSVRLGSWDRGMQYSHSIIENLLYHVVGWTDWNLALNPEGGPNWVRNFVDSPIIVDITKDTFYKQPMFYHLGHFSKFIPEGSTRVGLVASQKNDLDAVALLHPDGTGVVVVLNRSSKDVPLTIKDPAVGFLETISPGYSIHTYLWKRQ

SEQ ID NO: 1241 - DNA, 1608 bp, synthetic construct
  misc_feature 1..1608: note = Variant of B-Glucocerebrosidase
  source 1..1608: mol_type = other DNA
atggagttttcttctcctagtagagaagaatgccccaagccactgagcagggtgagcatcatggctggatccctcacagggctgcttcttttgcaggcagtctcatgggcctctggagccaggccctgtattcccaagtcattcggctactcctcagtggtgtgtgtatgcaatgccacctattgtgacagtgtcgatcctctcactctccctgctctgggtaccttctcccggtatgagagcacaagaagtggaagacgcatggagctctcagagggccctatagaggctaaccgcactgggacaggtctgctgctgaccctccaacctgaacagaagtttcagaaagtcaagggatttggaggagccatgactgatgcagcagcactcaacatcttggccctgtctccaccagcccagaacctgctgttgaagtcctacttctcagaggaggggattgagtacaacatcatccgggttcccatggctagctgtgacttctccattaggacctatacatacgctgacacccccgatgattttcagctccataatttcagtctccctgaagaagacaccaaatggaagatacctctgattcacagagccttgcaactgtcccaaaggccagtgagcctcttcgcttctccctggactagtcctacatggctgaagactaatggtgcttacaatgggaagggctccctgaaaggacagccaggtgacatatatcatcagacatgggcccgctactttgtgaaattccttgatgcctatgcagagcacgggctccaattctgggcagtcaccgcagaaaacgagccctcagctgggctgctgtctggctacccctttcagtgcttgggctttactcctgagcatcaacgggacttcattgcccgggatttggggccaacactggccaacagcacccaccacaatgtaagactcctcattctggatgaccagaggctgctgctccctcattgggccaaggtggtgttgacaaacccagaagctgccaaatatgttcatggcatcgctgtccactggtacctggattttttggcccctgccaagtggactctgggagagacccacagactcttccccaataccacactgtttgcatcagaagcctgcgctgggagcaaattctgggagcagtctgttaggctgggttcctgggatcggggccagcaatattcccatagtataatagagaacctcctctaccacgtggtaggatggacagactggaatctggctttgaacccagaaggaggccccaattgggtgcgcaactttgttgacagccccatcattgtggatatcacaaaggacaccttctacaaacagcctatgttctatcatctggggcactttagcaagttcattccagagggttccactagagtaggcttggttgcctcacagaagaatgatctggaagctgtggcactcctgcatcctgacgggagtgcagtggtggtagtactgaacaggtctagcaaagatgttcccttgactatcaaagacccagctgtgggctttctggaaaccatttcccctggatactctatccacacctatctctggagaagacag

SEQ ID NO: 1242 - protein, 536 aa, synthetic construct
  REGION 1..536: note = Variant of B-Glucocerebrosidase
MEFSSPSREECPKPLSRVSIMAGSLTGLLLLQAVSWASGARPCIPKSFGYSSVVCVCNATYCDSVDPLTLPALGTFSRYESTRSGRRMELSEGPIEANRTGTGLLLTLQPEQKFQKVKGFGGAMTDAAALNILALSPPAQNLLLKSYFSEEGIEYNIIRVPMASCDFSIRTYTYADTPDDFQLHNFSLPEEDTKWKIPLIHRALQLSQRPVSLFASPWTSPTWLKTNGAYNGKGSLKGQPGDIYHQTWARYFVKFLDAYAEHGLQFWAVTAENEPSAGLLSGYPFQCLGFTPEHQRDFIARDLGPTLANSTHHNVRLLILDDQRLLLPHWAKVVLTNPEAAKYVHGIAVHWYLDFLAPAKWTLGETHRLFPNTTLFASEACAGSKFWEQSVRLGSWDRGQQYSHSIIENLLYHVVGWTDWNLALNPEGGPNWVRNFVDSPIIVDITKDTFYKQPMFYHLGHFSKFIPEGSTRVGLVASQKNDLEAVALLHPDGSAVVVVLNRSSKDVPLTIKDPAVGFLETISPGYSIHTYLWRRQ

SEQ ID NO: 1243 - DNA, 1608 bp, synthetic construct
  misc_feature 1..1608: note = Variant of B-Glucocerebrosidase
  source 1..1608: mol_type = other DNA
atggagttttcttctcctagtagagaagaatgccccaagccactgagcagggtgagcatcatggctggatccctcacagggctgcttcttttgcaggcagtctcatgggcctctggagccaggccctgtattcccaagtcattcggctactcctcagtggtgtgtgtatgcaatgccacctattgtgacagtgtcgatcctctcactctccctgctctgggtaccttctcccggtatgagagcacaagaagtggaagacgcatggagctctcacagggccctatagaggctaaccgcactgggacaggtctgctgctgaccctccaacctgaacagaagtttcagaaagtcaagggatttggaggagccatgactgatgcagcagcactcaacatcttggccctgtctccaccagcccagaacctgctgttgaagtcctacttctcagaggaggggattgagtacaacatcatccgggttcccatggctagctgtgacttctccattaggacctatacatacgatgacacccccgatgattttcagctccataatttcagtctccctgaagaagacaccaaatggaagatacctctgattcacagagccttgcaactgtcccaaaggccagtgagcctcttcgcttctccctggactagtcctacatggctgaagactaatggtgcttacaatgggaagggctccctgaaaggacagccaggtgacatatatcatcagacatgggcccgctactttgtgaaattccttgatgcctatgcagagcacgggctccaattctgggcagtcaccgcagaaaacgagccctcagctgggctgctgtctggctacccctttcagtgcttgggctttactcctgagcatcaacgggacttcattgcccgggatttggggccaacactggccaacagcacccaccacaatgtaagactcctcattctggatgaccagaggctgctgctccctcattgggccaaggtggtgttgacaaacccagaagctgccaaatatgttcatggcatcgctgtccactggtacctggattttttggcccctgccaagtggactctgggagagacccacagactcttccccaataccacactgtttgcatcagaagcctgcgctgggagcaaattctgggagcagtctgttaggctgggttcctgggatcggggcatgcaatattcccatagtataatagagaacctcctctaccacgtggtaggatggacagactggaatctggctttgaacccagaaggaggccccaattgggtgcgcaactttgttgacagccccatcattgtggatatcacaaaggacaccttctacaaacagcctatgttctatcatctggggcactttagcaagttcattccagagggttccactagagtaggcttggttgcctcacagaagaatgatctggatgctgtggcactcctgcatcctgacgggagtgcagtggtggtagtactgaacaggtctagcaaagatgttcccttgactatcaaagacccagctgtgggctttctggaaaccatttcccctggatactctatccacacctatctctggagaagacag

SEQ ID NO: 1244 - protein, 536 aa, synthetic construct
  REGION 1..536: note = Variant of B-Glucocerebrosidase
MEFSSPSREECPKPLSRVSIMAGSLTGLLLLQAVSWASGARPCIPKSFGYSSVVCVCNATYCDSVDPLTLPALGTFSRYESTRSGRRMELSQGPIEANRTGTGLLLTLQPEQKFQKVKGFGGAMTDAAALNILALSPPAQNLLLKSYFSEEGIEYNIIRVPMASCDFSIRTYTYDDTPDDFQLHNFSLPEEDTKWKIPLIHRALQLSQRPVSLFASPWTSPTWLKTNGAYNGKGSLKGQPGDIYHQTWARYFVKFLDAYAEHGLQFWAVTAENEPSAGLLSGYPFQCLGFTPEHQRDFIARDLGPTLANSTHHNVRLLILDDQRLLLPHWAKVVLTNPEAAKYVHGIAVHWYLDFLAPAKWTLGETHRLFPNTTLFASEACAGSKFWEQSVRLGSWDRGMQYSHSIIENLLYHVVGWTDWNLALNPEGGPNWVRNFVDSPIIVDITKDTFYKQPMFYHLGHFSKFIPEGSTRVGLVASQKNDLDAVALLHPDGSAVVVVLNRSSKDVPLTIKDPAVGFLETISPGYSIHTYLWRRQ

SEQ ID NO: 1245 - DNA, 1608 bp, synthetic construct
  misc_feature 1..1608: note = Variant of B-Glucocerebrosidase
  source 1..1608: mol_type = other DNA
atggagttttcttctcctagtagagaagaatgccccaagccactgagcagggtgagcatcatggctggatccctcacagggctgcttcttttgcaggcagtctcatgggcctctggagccaggccctgtattcccaagtcattcggctactcctcagtggtgtgtgtatgcaatgccacctattgtgacagtgtcgatcctctcactctccctgctctgggtaccttctcccggtatgagagcacaagaagtggaagacgcatggagctctcacagggccctatacaagctaaccgcactgggacaggtctgctgctgaccctccaacctgaacagaagtttcagaaagtcaagggatttggaggagccatgactgatgcagcagcactcaacatcttggccctgtctccaccagcccagaacctgctgttgaagtcctacttctcagaggaggggattgagtacaacatcatccgggttcccatggctagctgtgacttctccattaggacctatacatacgatgacacccccgatgattttcagctccataatttcagtctccctgaagaagacaccaaatggaagatacctctgattcacagagccttgcaactgtcccaaaggccagtgagcctcttcgcttctccctggactagtcctacatggctgaagactaatggtgcttacaatgggaagggctccctgaaaggacagccaggtgacatatatcatcagacatgggcccgctactttgtgaaattccttgatgcctatgcagagcacgggctccaattctgggcagtcaccgcagaaaacgagccctcagctgggctgctgtctggctacccctttcagtgcttgggctttactcctgagcatcaacgggacttcattgcccgggatttggggccaacactggccaacagcacccaccacaatgtaagactcctcattctggatgaccagaggctgctgctccctcattgggccaaggtggtgttgacaaacccagaagctgccaaatatgttcatggcatcgctgtccactggtacctggattttttggcccctgccaagtggactctgggagagacccacagactcttccccaataccacactgtttgcatcagaagcctgcgctgggagcaaattctgggagcagtctgttaggctgggttcctgggatcggggccagcaatattcccatagtataatagagaacctcctctaccacgtggtaggatggacagactggaatctggctttgaacccagaaggaggccccaattgggtgcgcaactttgttgacagccccatcattgtggatatcacaaaggacaccttctacaaacagcctatgttctatcatctggggcactttagcaagttcattccagagggttccactagagtaggcttggttgcctcacagaagaatgatctggaagctgtggcactcctgcatcctgacgggagtgcagtggtggtagtactgaacaggtctagcaaagatgttcccttgactatcaaagacccagctgtgggctttctggaaaccatttcccctggatactctatccacacctatctctggagaagacag

SEQ ID NO: 1246 - protein, 536 aa, synthetic construct
  REGION 1..536: note = Variant of B-Glucocerebrosidase
MEFSSPSREECPKPLSRVSIMAGSLTGLLLLQAVSWASGARPCIPKSFGYSSVVCVCNATYCDSVDPLTLPALGTFSRYESTRSGRRMELSQGPIQANRTGTGLLLTLQPEQKFQKVKGFGGAMTDAAALNILALSPPAQNLLLKSYFSEEGIEYNIIRVPMASCDFSIRTYTYDDTPDDFQLHNFSLPEEDTKWKIPLIHRALQLSQRPVSLFASPWTSPTWLKTNGAYNGKGSLKGQPGDIYHQTWARYFVKFLDAYAEHGLQFWAVTAENEPSAGLLSGYPFQCLGFTPEHQRDFIARDLGPTLANSTHHNVRLLILDDQRLLLPHWAKVVLTNPEAAKYVHGIAVHWYLDFLAPAKWTLGETHRLFPNTTLFASEACAGSKFWEQSVRLGSWDRGQQYSHSIIENLLYHVVGWTDWNLALNPEGGPNWVRNFVDSPIIVDITKDTFYKQPMFYHLGHFSKFIPEGSTRVGLVASQKNDLEAVALLHPDGSAVVVVLNRSSKDVPLTIKDPAVGFLETISPGYSIHTYLWRRQ

SEQ ID NO: 1247 - DNA, 1608 bp, synthetic construct
  misc_feature 1..1608: note = Variant of B-Glucocerebrosidase
  source 1..1608: mol_type = other DNA
atggagttttcttctcctagtagagaagaatgccccaagccactgagcagggtgagcatcatggctggatccctcacagggctgcttcttttgcaggcagtctcatgggcctctggagccaggccctgtattcccaagtcattcggctactcctcagtggtgtgtgtatgcaatgccacctattgtgacagtgtcgatcctctcactctccctgctctgggtaccttctcccggtatgagagcacaagaagtggaagacgcatggagctctcagagggccctatagaggctaaccgcactgggacaggtctgctgctgaccctccaacctgaacagaagtttcagaaagtcaagggatttggaggagccatgactgatgcagcagcactcaacatcttggccctgtctccaccagcccagaacctgctgttgaagtcctacttctcagaggaggggattgagtacaacatcatccgggttcccatggctagctgtgacttctccattaggacctatacatacgatgacacccccgatgattttcagctccataatttcagtctccctgaagaagacaccaaatggaagatacctctgattcacagagccttgcaactgtcccaaaggccagtgagcctcttcgcttctccctggactagtcctacatggctgaagactaatggtgcttacaatgggaagggctccctgaaaggacagccaggtgacatatatcatcagacatgggcccgctactttgtgaaattccttgatgcctatgcagagcacgggctccaattctgggcagtcaccgcagaaaacgagccctcagctgggctgctgtctggctacccctttcagtgcttgggctttactcctgagcatcaacgggacttcattgcccgggatttggggccaacactggccaacagcacccaccacaatgtaagactcctcattctggatgaccagaggctgctgctccctcattgggccaaggtggtgttgacaaacccagaagctgccaaatatgttcatggcatcgctgtccactggtacctggattttttggcccctgccaagtggactctgggagagacccacagactcttccccaataccacactgtttgcatcagaagcctgcgctgggagcaaattctgggagcagtctgttaggctgggttcctgggatcggggcatgcaatattcccatagtataatagagaacctcctctaccacgtggtaggatggacagactggaatctggctttgaacccagaaggaggccccaattgggtgcgcaactttgttgacagccccatcattgtggatatcacaaaggacaccttctacaaacagcctatgttctatcatctggggcactttagcaagttcattccagagggttccactagagtaggcttggttgcctcacagaagaatgatctggatgctgtggcactcctgcatcctgacgggaccggggtggtggtagtactgaacaggtctagcaaagatgttcccttgactatcaaagacccagctgtgggctttctggaaaccatttcccctggatactctatccacacctatctctggagaagacag

SEQ ID NO: 1248 - protein, 536 aa, synthetic construct
  REGION 1..536: note = Variant of B-Glucocerebrosidase
MEFSSPSREECPKPLSRVSIMAGSLTGLLLLQAVSWASGARPCIPKSFGYSSVVCVCNATYCDSVDPLTLPALGTFSRYESTRSGRRMELSEGPIEANRTGTGLLLTLQPEQKFQKVKGFGGAMTDAAALNILALSPPAQNLLLKSYFSEEGIEYNIIRVPMASCDFSIRTYTYDDTPDDFQLHNFSLPEEDTKWKIPLIHRALQLSQRPVSLFASPWTSPTWLKTNGAYNGKGSLKGQPGDIYHQTWARYFVKFLDAYAEHGLQFWAVTAENEPSAGLLSGYPFQCLGFTPEHQRDFIARDLGPTLANSTHHNVRLLILDDQRLLLPHWAKVVLTNPEAAKYVHGIAVHWYLDFLAPAKWTLGETHRLFPNTTLFASEACAGSKFWEQSVRLGSWDRGMQYSHSIIENLLYHVVGWTDWNLALNPEGGPNWVRNFVDSPIIVDITKDTFYKQPMFYHLGHFSKFIPEGSTRVGLVASQKNDLDAVALLHPDGTGVVVVLNRSSKDVPLTIKDPAVGFLETISPGYSIHTYLWRRQ

SEQ ID NO: 1249 - DNA, 1608 bp, synthetic construct
  misc_feature 1..1608: note = Variant of B-Glucocerebrosidase
  source 1..1608: mol_type = other DNA
atggagttttcttctcctagtagagaagaatgccccaagccactgagcagggtgagcatcatggctggatccctcacagggctgcttcttttgcaggcagtctcatgggcctctggagccaggccctgtattcccaagtcattcggctactcctcagtggtgtgtgtatgcaatgccacctattgtgacagtgtcgatcctctcactctccctgctctgggtaccttctcccggtatgagagcacaagaagtggaagacgcatggagctctcacagggccctatagaggctaaccgcactgggacaggtctgctgctgaccctccaacctgaacagaagtttcagaaagtcaagggatttggaggagccatgactgatgcagcagcactcaacatcttggccctgtctccaccagcccagaacctgctgttgaagtcctacttctcagaggaggggattgagtacaacatcatccgggttcccatggctagctgtgacttctccattaggacctatacatacgatgacacccccgatgattttagcctccataatttcagtctccctgaagaagacaccaaatggaagatacctctgattcacagagccttgcaactgtcccaaaggccagtgagcctcttcgcttctccctggactagtcctacatggctgaagactaatggtgcttacaatgggaagggctccctgaaaggacagccaggtgacatatatcatcagacatgggcccgctactttgtgaaattccttgatgcctatgcagagcacgggctccaattctgggcagtcaccgcagaaaacgagccctcagctgggctgctgtctggctacccctttcagtgcttgggctttactcctgagcatcaacgggacttcattgcccgggatttggggccaacactggccaacagcacccaccacaatgtaagactcctcattctggatgaccagaggctgctgctccctcattgggccaaggtggtgttgacaaacccagaagctgccaaatatgttcatggcatcgctgtccactggtacctggattttttggcccctgccaagtggactctgggagagacccacagactcttccccaataccacactgtttgcatcagaagcctgcgctgggagcaaattctgggagcagtctgttaggctgggttcctgggatcggggcatgcaatattcccatagtataatagagaacctcctctggcacgtggtaggatggacagactggaatctggctttgaacccagaaggaggccccaattgggtgcgcaactttgttgacagccccatcattgtggatatcacaaaggacaccttctacaaacagcctatgttctatcatctggggcactttagcaagttcattccagagggttccactagagtaggcttggttgcctcacagaagaatgatctggaagctgtggcactcctgcatcctgacgggagtgcagtggtggtagtactgaacaggtctagcaaagatgttcccttgactatcaaagacccagctgtgggctttctggaaaccatttcccctggatactctatccacacctatctctggagaagacag

SEQ ID NO: 1250 - protein, 536 aa, synthetic construct
  REGION 1..536: note = Variant of B-Glucocerebrosidase
MEFSSPSREECPKPLSRVSIMAGSLTGLLLLQAVSWASGARPCIPKSFGYSSVVCVCNATYCDSVDPLTLPALGTFSRYESTRSGRRMELSQGPIEANRTGTGLLLTLQPEQKFQKVKGFGGAMTDAAALNILALSPPAQNLLLKSYFSEEGIEYNIIRVPMASCDFSIRTYTYDDTPDDFSLHNFSLPEEDTKWKIPLIHRALQLSQRPVSLFASPWTSPTWLKTNGAYNGKGSLKGQPGDIYHQTWARYFVKFLDAYAEHGLQFWAVTAENEPSAGLLSGYPFQCLGFTPEHQRDFIARDLGPTLANSTHHNVRLLILDDQRLLLPHWAKVVLTNPEAAKYVHGIAVHWYLDFLAPAKWTLGETHRLFPNTTLFASEACAGSKFWEQSVRLGSWDRGMQYSHSIIENLLWHVVGWTDWNLALNPEGGPNWVRNFVDSPIIVDITKDTFYKQPMFYHLGHFSKFIPEGSTRVGLVASQKNDLEAVALLHPDGSAVVVVLNRSSKDVPLTIKDPAVGFLETISPGYSIHTYLWRRQ

SEQ ID NO: 1251 - DNA, 1608 bp, synthetic construct
  misc_feature 1..1608: note = Variant of B-Glucocerebrosidase
  source 1..1608: mol_type = other DNA
atggagttttcttctcctagtagagaagaatgccccaagccactgagcagggtgagcatcatggctggatccctcacagggctgcttcttttgcaggcagtctcatgggcctctggagccaggccctgtattcccaagtcattcggctactcctcagtggtgtgtgtatgcaatgccacctattgtgacagtgtcgatcctctcactctccctgctctgggtaccttctcccggtatgagagcacaagaagtggaagacgcatggagctctcacagggccctatagaggctaaccgcactgggacaggtctgctgctgaccctccaacctgaacagaagtttcagaaagtcaagggatttggaggagccatgactgatgcagcagcactcaacatcttggccctgtctccaccagcccagaacctgctgttgaagtcctacttctcagaggaggggattgagtacaacatcatccgggttcccatggctagctgtgacttctccattaggacctatacatacgctgacacccccgatgattttcagctccataatttcagtctccctgaagaagacaccaaatggaagatacctctgattcagagagccttgcaactgtcccaaaggccagtgagcctcttcgcttctccctggactagtcctacatggctgaagactaatggtgcttacaatgggaagggctccctgaaaggacagccaggtgacatatatcatcagacatgggcccgctactttgtgaaattccttgatgcctatgcagagcacgggctccaattctgggcagtcaccgcagaaaacgagccctcagctgggctgctgtctggctacccctttcagtgcttgggctttactcctgagcatcaacgggacttcattgcccgggatttggggccaacactggccaacagcacccaccacaatgtaagactcctcattctggatgaccagaggctgctgctccctcattgggccaaggtggtgttgacaaacccagaagctgccaaatatgttcatggcatcgctgtccactggtacctggattttttggcccctgccaagtggactctgggagagacccacagactcttccccaataccacactgtttgcatcagaagcctgcgctgggagcaaattctgggagcagtctgttaggctgggttcctgggatcggggcatgcaatattcccatagtataatagagaacctcctctaccacgtggtaggatggacagactggaatctggctttgaacccagaaggaggccccaattgggtgcgcaactttgttgacagccccatcattgtggatatcacaaaggacaccttctacaaacagcctatgttctatcatctggggcactttagcaagttcattccagagggttccactagagtaggcttggttgcctcacagaagaatgatctggaagctgtggcactcctgcatcctgacgggagtgcagtggtggtagtactgaacaggtctagcaaagatgttcccttgactatcaaagacccagctgtgggctttctggaaaccatttcccctggatactctatccacacctatctctggagaagacag

SEQ ID NO: 1252 - protein, 536 aa, synthetic construct
  REGION 1..536: note = Variant of B-Glucocerebrosidase
MEFSSPSREECPKPLSRVSIMAGSLTGLLLLQAVSWASGARPCIPKSFGYSSVVCVCNATYCDSVDPLTLPALGTFSRYESTRSGRRMELSQGPIEANRTGTGLLLTLQPEQKFQKVKGFGGAMTDAAALNILALSPPAQNLLLKSYFSEEGIEYNIIRVPMASCDFSIRTYTYADTPDDFQLHNFSLPEEDTKWKIPLIQRALQLSQRPVSLFASPWTSPTWLKTNGAYNGKGSLKGQPGDIYHQTWARYFVKFLDAYAEHGLQFWAVTAENEPSAGLLSGYPFQCLGFTPEHQRDFIARDLGPTLANSTHHNVRLLILDDQRLLLPHWAKVVLTNPEAAKYVHGIAVHWYLDFLAPAKWTLGETHRLFPNTTLFASEACAGSKFWEQSVRLGSWDRGMQYSHSIIENLLYHVVGWTDWNLALNPEGGPNWVRNFVDSPIIVDITKDTFYKQPMFYHLGHFSKFIPEGSTRVGLVASQKNDLEAVALLHPDGSAVVVVLNRSSKDVPLTIKDPAVGFLETISPGYSIHTYLWRRQ

SEQ ID NO: 1253 - DNA, 1608 bp, synthetic construct
  misc_feature 1..1608: note = Variant of B-Glucocerebrosidase
  source 1..1608: mol_type = other DNA
atggagttttcttctcctagtagagaagaatgccccaagccactgagcagggtgagcatcatggctggatccctcacagggctgcttcttttgcaggcagtctcatgggcctctggagccaggccctgtattcccaagtcattcggctactcctcagtggtgtgtgtatgcaatgccacctattgtgacagtgtcgatcctctcactctccctgctctgggtaccttctcccggtatgagagcacaagaagtggaagacgcatggagctctcagagggccctatacaagctaaccgcactgggacaggtctgctgctgaccctccaacctgaacagaagtttcagaaagtcaagggatttggaggagccatgactgatgcagcagcactcaacatcttggccctgtctccaccagcccagaacctgctgttgaagtcctacttctcagaggaggggattgagtacaacatcatccgggttcccatggctagctgtgacttctccattaggacctatacatacgctgacacccccgatgattttagcctccataatttcagtctccctgaagaagacacccagtggaagatacctctgattcacagagccttgcaactgtcccaaaggccagtgagcctcttcgcttctccctggactagtcctacatggctgaagactaatggtgcttacaatgggaagggctccctgaaaggacagccaggtgacatatatcatcagacatgggcccgctactttgtgaaattccttgatgcctatgcagagcacgggctccaattctgggcagtcaccgcagaaaacgagccctcagctgggctgctgtctggctacccctttcagtgcttgggctttactcctgagcatcaacgggacttcattgcccgggatttggggccaacactggccaacagcacccaccacaatgtaagactcctcattctggatgaccagaggctgctgctccctcattgggccaaggtggtgttgacaaacccagaagctgccaaatatgttcatggcatcgctgtccactggtacctggattttttggcccctgccaagtggactctgggagagacccacagactcttccccaataccacactgtttgcatcagaagcctgcgctgggagcaaattctgggagcagtctgttaggctgggttcctgggatcggggcatgcaatattcccatagtataatagagaacctcctctaccacgtggtaggatggacagactggaatctggctttgaacccagaaggaggccccaattgggtgcgcaactttgttgacagccccatcattgtggatatcacaaaggacaccttctacaaacagcctatgttctatcatctggggcactttagcaagttcattccagagggttccactagagtaggcttggttgcctcacagaagaatgatctggatgctgtggcactcctgcatcctgacgggagtgcagtggtggtagtactgaacaggtctagcaaagatgttcccttgactatcaaagacccagctgtgggctttctggaaaccatttcccctggatactctatccacacctatctctggagaagacag

SEQ ID NO: 1254 - protein, 536 aa, synthetic construct
  REGION 1..536: note = Variant of B-Glucocerebrosidase
MEFSSPSREECPKPLSRVSIMAGSLTGLLLLQAVSWASGARPCIPKSFGYSSVVCVCNATYCDSVDPLTLPALGTFSRYESTRSGRRMELSEGPIQANRTGTGLLLTLQPEQKFQKVKGFGGAMTDAAALNILALSPPAQNLLLKSYFSEEGIEYNIIRVPMASCDFSIRTYTYADTPDDFSLHNFSLPEEDTQWKIPLIHRALQLSQRPVSLFASPWTSPTWLKTNGAYNGKGSLKGQPGDIYHQTWARYFVKFLDAYAEHGLQFWAVTAENEPSAGLLSGYPFQCLGFTPEHQRDFIARDLGPTLANSTHHNVRLLILDDQRLLLPHWAKVVLTNPEAAKYVHGIAVHWYLDFLAPAKWTLGETHRLFPNTTLFASEACAGSKFWEQSVRLGSWDRGMQYSHSIIENLLYHVVGWTDWNLALNPEGGPNWVRNFVDSPIIVDITKDTFYKQPMFYHLGHFSKFIPEGSTRVGLVASQKNDLDAVALLHPDGSAVVVVLNRSSKDVPLTIKDPAVGFLETISPGYSIHTYLWRRQ

SEQ ID NO: 1255 - DNA, 1608 bp, synthetic construct
  misc_feature 1..1608: note = Variant of B-Glucocerebrosidase
  source 1..1608: mol_type = other DNA
atggagttttcttctcctagtagagaagaatgccccaagccactgagcagggtgagcatcatggctggatccctcacagggctgcttcttttgcaggcagtctcatgggcctctggagccaggccctgtattcccaagtcattcggctactcctcagtggtgtgtgtatgcaatgccacctattgtgacagtgtcgatcctctcactctccctgctctgggtaccttctcccggtatgagagcacaagaagtggaagacgcatggagctctcacagggccctatagaggctaaccgcactgggacaggtctgctgctgaccctccaacctgaacagaagtttcagaaagtcaagggatttggaggagccatgactgatgcagcagcactcaacatcttggccctgtctccaccagcccagaacctgctgttgaagtcctacttctcagaggaggggattgagtacaacatcatccgggttcccatggctagctgtgacttctccattaggacctatacatacgatgacacccccgatgattttcagctccataatttcagtctccctgaagaagacacccagtggaagatacctctgattcacagagccttgcaactgtcccaaaggccagtgagcctcttcgcttctccctggactagtcctacatggctgaagactaatggtgcttacaatgggaagggctccctgaaaggacagccaggtgacatatatcatcagacatgggcccgctactttgtgaaattccttgatgcctatgcagagcacgggctccaattctgggcagtcaccgcagaaaacgagccctcagctgggctgctgtctggctacccctttcagtgcttgggctttactcctgagcatcaacgggacttcattgcccgggatttggggccaacactggccaacagcacccaccacaatgtaagactcctcattctggatgaccagaggctgctgctccctcattgggccaaggtggtgttgacaaacccagaagctgccaaatatgttcatggcatcgctgtccactggtacctggattttttggcccctcctaagtggactctgggagagacccacagactcttccccaataccacactgtttgcatcagaagcctgcgctgggagcaaattctgggagcagtctgttaggctgggttcctgggatcggggcgaacaatattcccatagtataatagagaacctcctctaccacgtggtaggatggacagactggaatctggctttgaacccagaaggaggccccaattgggtgcgcaactttgttgacagccccatcattgtggatatcacaaaggacaccttctacaaacagcctatgttctatcatctggggcactttagcaagttcattccagagggttccactagagtaggcttggttgcctcacagaagaatgatctggatgctgtggcactcctgcatcctgacgggagtgcagtggtggtagtactgaacaggtctagcaaagatgttcccttgactatcaaagacccagctgtgggctttctggaaaccatttcccctggatactctatccacacctatctctggagaagacag

SEQ ID NO: 1256 - protein, 536 aa, synthetic construct
  REGION 1..536: note = Variant of B-Glucocerebrosidase
MEFSSPSREECPKPLSRVSIMAGSLTGLLLLQAVSWASGARPCIPKSFGYSSVVCVCNATYCDSVDPLTLPALGTFSRYESTRSGRRMELSQGPIEANRTGTGLLLTLQPEQKFQKVKGFGGAMTDAAALNILALSPPAQNLLLKSYFSEEGIEYNIIRVPMASCDFSIRTYTYDDTPDDFQLHNFSLPEEDTQWKIPLIHRALQLSQRPVSLFASPWTSPTWLKTNGAYNGKGSLKGQPGDIYHQTWARYFVKFLDAYAEHGLQFWAVTAENEPSAGLLSGYPFQCLGFTPEHQRDFIARDLGPTLANSTHHNVRLLILDDQRLLLPHWAKVVLTNPEAAKYVHGIAVHWYLDFLAPPKWTLGETHRLFPNTTLFASEACAGSKFWEQSVRLGSWDRGEQYSHSIIENLLYHVVGWTDWNLALNPEGGPNWVRNFVDSPIIVDITKDTFYKQPMFYHLGHFSKFIPEGSTRVGLVASQKNDLDAVALLHPDGSAVVVVLNRSSKDVPLTIKDPAVGFLETISPGYSIHTYLWRRQ

SEQ ID NO: 1257 - DNA, 1608 bp, synthetic construct
  misc_feature 1..1608: note = Variant of B-Glucocerebrosidase
  source 1..1608: mol_type = other DNA
atggagttttcttctcctagtagagaagaatgccccaagccactgagcagggtgagcatcatggctggatccctcacagggctgcttcttttgcaggcagtctcatgggcctctggagccaggccctgtattcccaagtcattcggctactcctcagtggtgtgtgtatgcaatgccacctattgtgacagtgtcgatcctctcactctccctgctctgggtaccttctcccggtatgagagcacaagaagtggaagacgcatggagctctcacagggccctatacaagctaaccgcactgggacaggtctgctgctgaccctccaacctgaacagaagtttcagaaagtcaagggatttggaggagccatgactgatgcagcagcactcaacatcttggccctgtctccaccagcccagaacctgctgttgaagtcctacttctcagaggaggggattgagtacaacatcatccgggttcccatggctagctgtgacttctccattaggacctatacatacgctgacacccccgatgattttcagctccataatttcagtctccctgaagaagacaccaaatggaagatacctctgattcacagagccttgcaactgtcccaaaggccagtgagcctcttcgcttctccctggactagtcctacatggctgaagactaatggtgcttacaatgggaagggctccctgaaaggacagccaggtgacatatatcatcagacatgggcccgctactttgtgaaattccttgatgcctatgcagagcacgggctccaattctgggcagtcaccgcagaaaacgagccctcagctgggctgctgtctggctacccctttcagtgcttgggctttactcctgagcatcaacgggacttcattgcccgggatttggggccaacactggccaacagcacccaccacaatgtaagactcctcattctggatgaccagaggctgctgctccctcattgggccaaggtggtgttgacaaacccagaagctgccaaatatgttcatggcatcgctgtccactggtacctggattttttggcccctcctaagtggactctgggagagacccacagactcttccccaataccacactgtttgcatcagaagcctgcgctgggagcaaattctgggagcagtctgttaggctgggttcctgggatcggggcatgcaatattcccatagtataatagagaacctcctctaccacgtggtaggatggacagactggaatctggctttgaacccagaaggaggccccaattgggtgcgcaactttgttgacagccccatcattgtggatatcacaaaggacaccttctacaaacagcctatgttctatcatctggggcactttagcaagttcattccagagggttccactagagtaggcttggttgcctcacagaagaatgatctggatgctgtggcactcctgcatcctgacgggagtgcagtggtggtagtactgaacaggtctagcaaagatgttcccttgactatcaaagacccagctgtgggctttctggaaaccatttcccctggatactctatccacacctatctctggagaagacag

SEQ ID NO: 1258 - protein, 536 aa, synthetic construct
  REGION 1..536: note = Variant of B-Glucocerebrosidase
MEFSSPSREECPKPLSRVSIMAGSLTGLLLLQAVSWASGARPCIPKSFGYSSVVCVCNATYCDSVDPLTLPALGTFSRYESTRSGRRMELSQGPIQANRTGTGLLLTLQPEQKFQKVKGFGGAMTDAAALNILALSPPAQNLLLKSYFSEEGIEYNIIRVPMASCDFSIRTYTYADTPDDFQLHNFSLPEEDTKWKIPLIHRALQLSQRPVSLFASPWTSPTWLKTNGAYNGKGSLKGQPGDIYHQTWARYFVKFLDAYAEHGLQFWAVTAENEPSAGLLSGYPFQCLGFTPEHQRDFIARDLGPTLANSTHHNVRLLILDDQRLLLPHWAKVVLTNPEAAKYVHGIAVHWYLDFLAPPKWTLGETHRLFPNTTLFASEACAGSKFWEQSVRLGSWDRGMQYSHSIIENLLYHVVGWTDWNLALNPEGGPNWVRNFVDSPIIVDITKDTFYKQPMFYHLGHFSKFIPEGSTRVGLVASQKNDLDAVALLHPDGSAVVVVLNRSSKDVPLTIKDPAVGFLETISPGYSIHTYLWRRQ

SEQ ID NO: 1259 - DNA, 1608 bp, synthetic construct
  misc_feature 1..1608: note = Variant of B-Glucocerebrosidase
  source 1..1608: mol_type = other DNA
atggagttttcttctcctagtagagaagaatgccccaagccactgagcagggtgagcatcatggctggatccctcacagggctgcttcttttgcaggcagtctcatgggcctctggagccaggccctgtattcccaagtcattcggctactcctcagtggtgtgtgtatgcaatgccacctattgtgacagtgtcgatcctctcactctccctgctctgggtaccttctcccggtatgagagcacaagaagtggaagacgcatggagctctcaatgggccctatagaggctaaccgcactgggacaggtctgctgctgaccctccaacctgaacagaagtttcagaaagtcaagggatttggaggagccatgactgatgcagcagcactcaacatcttggccctgtctccaccagcccagaacctgctgttgaagtcctacttctcagaggaggggattgagtacaacatcatccgggttcccatggctagctgtgacttctccattaggacctatacatacgctgacacccccgatgattttcagctccataatttcagtctccctgaagaagacaccaaatggaagatacctctgattcacagagccttgcaactgtcccaaaggccagtgagcctcttcgcttctccctggactagtcctacatggctgaagactaatggtgcttacaatgggaagggctccctgaaaggacagccaggtgacatatatcatcagacatgggcccgctactttgtgaaattccttgatgcctatgcagagcacgggctccaattctgggcagtcaccgcagaaaacgagccctcagctgggctgctgtctggctacccctttcagtgcttgggctttactcctgagcatcaacgggacttcattgcccgggatttggggccaacactggccaacagcacccaccacaatgtaagactcctcattctggatgaccagaggctgctgctccctcattgggccaaggtggtgttgacaaacccagaagctgccaaatatgttcatggcatcgctgtccactggtacctggattttttggcccctgccaagtggactctgggagagacccacagactcttccccaataccacactgtttgcatcagaagcctgcgctgggagcaaattctgggagcagtctgttaggctgggttcctgggatcggggcatgcaatattcccatagtataatagagaacctcctctaccacgtggtaggatggacagactggaatctggctttgaacccagaaggaggccccaattgggtgcgcaactttgttgacagccccatcattgtggatatcacaaaggacaccttctacaaacagcctatgttctatcatctggggcactttagcaagttcattccagagggttccactagagtaggcttggttgcctcacagaagaatgatctggatgctgtggcactcctgcatcctgacgggagtgcagtggtggtagtactgaacaggtctagcaaagatgttcccttgactatcaaagacccagctgtgggctttctggaaaccatttcccctggatactctatccacacctatctctggagaagacag

SEQ ID NO: 1260 - protein, 536 aa, synthetic construct
  REGION 1..536: note = Variant of B-Glucocerebrosidase
MEFSSPSREECPKPLSRVSIMAGSLTGLLLLQAVSWASGARPCIPKSFGYSSVVCVCNATYCDSVDPLTLPALGTFSRYESTRSGRRMELSMGPIEANRTGTGLLLTLQPEQKFQKVKGFGGAMTDAAALNILALSPPAQNLLLKSYFSEEGIEYNIIRVPMASCDFSIRTYTYADTPDDFQLHNFSLPEEDTKWKIPLIHRALQLSQRPVSLFASPWTSPTWLKTNGAYNGKGSLKGQPGDIYHQTWARYFVKFLDAYAEHGLQFWAVTAENEPSAGLLSGYPFQCLGFTPEHQRDFIARDLGPTLANSTHHNVRLLILDDQRLLLPHWAKVVLTNPEAAKYVHGIAVHWYLDFLAPAKWTLGETHRLFPNTTLFASEACAGSKFWEQSVRLGSWDRGMQYSHSIIENLLYHVVGWTDWNLALNPEGGPNWVRNFVDSPIIVDITKDTFYKQPMFYHLGHFSKFIPEGSTRVGLVASQKNDLDAVALLHPDGSAVVVVLNRSSKDVPLTIKDPAVGFLETISPGYSIHTYLWRRQ

SEQ ID NO: 1261 - DNA, 1608 bp, synthetic construct
  misc_feature 1..1608: note = Variant of B-Glucocerebrosidase
  source 1..1608: mol_type = other DNA
atggagttttcttctcctagtagagaagaatgccccaagccactgagcagggtgagcatcatggctggatccctcacagggctgcttcttttgcaggcagtctcatgggcctctggagccaggccctgtattcccaagtcattcggctactcctcagtggtgtgtgtatgcaatgccacctattgtgacagtgtcgatcctctcactctccctgctctgggtaccttctcccggtatgagagcacaagaagtggaagacgcatggagctctcacagggccctatacaagctaaccgcactgggacaggtctgctgctgaccctccaacctgaacagaagtttcagaaagtcaagggatttggaggagccatgactgatgcagcagcactcaacatcttggccctgtctccaccagcccagaacctgctgttgaagtcctacttctcagaggaggggattgagtacaacatcatccgggttcccatggctagctgtgacttctccattaggacctatacatacgatgacacccccgatgattttcagctccataatttcagtctccctgaagaagacaccaaatggaagatacctctgattcacagagccttgcaactgtcccaaaggccagtgagcctcttcgcttctccctggactagtcctacatggctgaagactaatggtgcttacaatgggaagggctccctgaaaggacagccaggtgacatatatcatcagacatgggcccgctactttgtgaaattccttgatgcctatgcagagcacgggctccaattctgggcagtcaccgcagaaaacgagccctcagctgggctgctgtctggctacccctttcagtgcttgggctttactcctgagcatcaacgggacttcattgcccgggatttggggccaacactggccaacagcacccaccacaatgtaagactcctcattctggatgaccagaggctgctgctccctcattgggccaaggtggtgttgacaaacccagaagctgccaaatatgttcatggcatcgctgtccactggtacctggattttttggcccctgccaagtggactctgggagagacccacagactcttccccaataccacactgtttgcatcagaagcctgcgctgggagcaaattctgggagcagtctgttaggctgggttcctgggatcggggcatgcaatattcccatagtataatagagaacctcctctaccacgtggtaggatggacagactggaatctggctttgaacccagaaggaggccccaattgggtgcgcaactttgttgacagccccatcattgtggatatcacaaaggacaccttctacaaacagcctatgttctatcatctggggcactttagcaagttcattccagagggttccactagagtaggcttggttgcctcacagaagaatgatctggaagctgtggcactcctgcatcctgacgggaccggggtggtggtagtactgaacaggtctagcaaagatgttcccttgactatcaaagacccagctgtgggctttctggaaaccatttcccctggatactctatccacacctatctctggagaagacag

SEQ ID NO: 1262 - protein, 536 aa, synthetic construct
  REGION 1..536: note = Variant of B-Glucocerebrosidase
MEFSSPSREECPKPLSRVSIMAGSLTGLLLLQAVSWASGARPCIPKSFGYSSVVCVCNATYCDSVDPLTLPALGTFSRYESTRSGRRMELSQGPIQANRTGTGLLLTLQPEQKFQKVKGFGGAMTDAAALNILALSPPAQNLLLKSYFSEEGIEYNIIRVPMASCDFSIRTYTYDDTPDDFQLHNFSLPEEDTKWKIPLIHRALQLSQRPVSLFASPWTSPTWLKTNGAYNGKGSLKGQPGDIYHQTWARYFVKFLDAYAEHGLQFWAVTAENEPSAGLLSGYPFQCLGFTPEHQRDFIARDLGPTLANSTHHNVRLLILDDQRLLLPHWAKVVLTNPEAAKYVHGIAVHWYLDFLAPAKWTLGETHRLFPNTTLFASEACAGSKFWEQSVRLGSWDRGMQYSHSIIENLLYHVVGWTDWNLALNPEGGPNWVRNFVDSPIIVDITKDTFYKQPMFYHLGHFSKFIPEGSTRVGLVASQKNDLEAVALLHPDGTGVVVVLNRSSKDVPLTIKDPAVGFLETISPGYSIHTYLWRRQ

SEQ ID NO: 1263 - DNA, 1608 bp, synthetic construct
  misc_feature 1..1608: note = Variant of B-Glucocerebrosidase
  source 1..1608: mol_type = other DNA
atggagttttcttctcctagtagagaagaatgccccaagccactgagcagggtgagcatcatggctggatccctcacagggctgcttcttttgcaggcagtctcatgggcctctggagccaggccctgtattcccaagtcattcggctactcctcagtggtgtgtgtatgcaatgccacctattgtgacagtgtcgatcctctcactctccctgctctgggtaccttctcccggtatgagagcacaagaagtggaagacgcatggagctctcaatgggccctatagaggctaaccgcactgggacaggtctgctgctgaccctccaacctgaacagaagtttcagaaagtcaagggatttggaggagccatgactgatgcagcagcactcaacatcttggccctgtctccaccagcccagaacctgctgttgaagtcctacttctcagaggaggggattgagtacaacatcatccgggttcccatggctagctgtgacttctccattaggacctatacatacgctgacacccccgatgattttcagctccataatttcagtctccctgaagaagacaccaaatggaagatacctctgattcagagagccttgcaactgtcccaaaggccagtgagcctcttcgcttctccctggactagtcctacatggctgaagactaatggtgcttacaatgggaagggctccctgaaaggacagccaggtgacatatatcatcagacatgggcccgctactttgtgaaattccttgatgcctatgcagagcacgggctccaattctgggcagtcaccgcagaaaacgagccctcagctgggctgctgtctggctacccctttcagtgcttgggctttactcctgagcatcaacgggacttcattgcccgggatttggggccaacactggccaacagcacccaccacaatgtaagactcctcattctggatgaccagaggctgctgctccctcattgggccaaggtggtgttgacaaacccagaagctgccaaatatgttcatggcatcgctgtccactggtacctggattttttggcccctcctaagtggactctgggagagacccacagactcttccccaataccacactgtttgcatcagaagcctgcgctgggagcaaattctgggagcagtctgttaggctgggttcctgggatcggggcatgcaatattcccatagtataatagagaacctcctctaccacgtggtaggatggacagactggaatctggctttgaacccagaaggaggccccaattgggtgcgcaactttgttgacagccccatcattgtggatatcacaaaggacaccttctacaaacagcctatgttctatcatctggggcactttagcaagttcattccagagggttccactagagtaggcttggttgcctcacagaagaatgatctggatgctgtggcactcctgcatcctgacgggagtgcagtggtggtagtactgaacaggtctagcaaagatgttcccttgactatcaaagacccagctgtgggctttctggaaaccatttcccctggatactctatccacacctatctctggagaagacag

SEQ ID NO: 1264 - protein, 536 aa, synthetic construct
  REGION 1..536: note = Variant of B-Glucocerebrosidase
MEFSSPSREECPKPLSRVSIMAGSLTGLLLLQAVSWASGARPCIPKSFGYSSVVCVCNATYCDSVDPLTLPALGTFSRYESTRSGRRMELSMGPIEANRTGTGLLLTLQPEQKFQKVKGFGGAMTDAAALNILALSPPAQNLLLKSYFSEEGIEYNIIRVPMASCDFSIRTYTYADTPDDFQLHNFSLPEEDTKWKIPLIQRALQLSQRPVSLFASPWTSPTWLKTNGAYNGKGSLKGQPGDIYHQTWARYFVKFLDAYAEHGLQFWAVTAENEPSAGLLSGYPFQCLGFTPEHQRDFIARDLGPTLANSTHHNVRLLILDDQRLLLPHWAKVVLTNPEAAKYVHGIAVHWYLDFLAPPKWTLGETHRLFPNTTLFASEACAGSKFWEQSVRLGSWDRGMQYSHSIIENLLYHVVGWTDWNLALNPEGGPNWVRNFVDSPIIVDITKDTFYKQPMFYHLGHFSKFIPEGSTRVGLVASQKNDLDAVALLHPDGSAVVVVLNRSSKDVPLTIKDPAVGFLETISPGYSIHTYLWRRQ

SEQ ID NO: 1265 - DNA, 1608 bp, synthetic construct
  misc_feature 1..1608: note = Variant of B-Glucocerebrosidase
  source 1..1608: mol_type = other DNA
atggagttttcttctcctagtagagaagaatgccccaagccactgagcagggtgagcatcatggctggatccctcacagggctgcttcttttgcaggcagtctcatgggcctctggagccaggccctgtattcccaagtcattcggctactcctcagtggtgtgtgtatgcaatgccacctattgtgacagtgtcgatcctctcactctccctgctctgggtaccttctcccggtatgagagcacaagaagtggaagacgcatggagctctcagagggccctatacaagctaaccgcactgggacaggtctgctgctgaccctccaacctgaacagaagtttcagaaagtcaagggatttggaggagccatgactgatgcagcagcactcaacatcttggccctgtctccaccagcccagaacctgctgttgaagtcctacttctcagaggaggggattgagtacaacatcatccgggttcccatggctagctgtgacttctccattaggacctatacatacgctgacacccccgatgattttcagctccataatttcagtctccctgaagaagacaccaaatggaagatacctctgattcacagagccttgcaactgtcccaaaggccagtgagcctcttcgcttctccctggactagtcctacatggctgaagactaatggtgcttacaatgggaagggctccctgaaaggacagccaggtgacatatatcatcagacatgggcccgctactttgtgaaattccttgatgcctatgcagagcacgggctccaattctgggcagtcaccgcagaaaacgagccctcagctgggctgctgtctggctacccctttcagtgcttgggctttactcctgagcatcaacgggacttcattgcccgggatttggggccaacactggccaacagcacccaccacaatgtaagactcctcattctggatgaccagaggctgctgctccctcattgggccaaggtggtgttgacaaacccagaagctgccaaatatgttcatggcatcgctgtccactggtacctggattttttggcccctgccaagtggactctgggagagacccacagactcttccccaataccacactgtttgcatcagaagcctgcgtggggagcaaattctgggagcagtctgttaggctgggttcctgggatcggggcatgcaatattcccatagtataatagagaacctcctctaccacgtggtaggatggacagactggaatctggctttgaacccagaaggaggccccaattgggtgcgcaactttgttgacagccccatcattgtggatatcacaaaggacaccttctacaaacagcctatgttctatcatctggggcactttagcaagttcattccagagggttccactagagtaggcttggttgcctcacagaagaatgatctggatgctgtggcactcctgcatcctgacgggagtgcagtggtggtagtactgaacaggtctagcaaagatgttcccttgactatcaaagacccagctgtgggctttctggaaaccatttcccctggatactctatccacacctatctctggagaagacag

SEQ ID NO: 1266 - protein, 536 aa, synthetic construct
  REGION 1..536: note = Variant of B-Glucocerebrosidase
MEFSSPSREECPKPLSRVSIMAGSLTGLLLLQAVSWASGARPCIPKSFGYSSVVCVCNATYCDSVDPLTLPALGTFSRYESTRSGRRMELSEGPIQANRTGTGLLLTLQPEQKFQKVKGFGGAMTDAAALNILALSPPAQNLLLKSYFSEEGIEYNIIRVPMASCDFSIRTYTYADTPDDFQLHNFSLPEEDTKWKIPLIHRALQLSQRPVSLFASPWTSPTWLKTNGAYNGKGSLKGQPGDIYHQTWARYFVKFLDAYAEHGLQFWAVTAENEPSAGLLSGYPFQCLGFTPEHQRDFIARDLGPTLANSTHHNVRLLILDDQRLLLPHWAKVVLTNPEAAKYVHGIAVHWYLDFLAPAKWTLGETHRLFPNTTLFASEACVGSKFWEQSVRLGSWDRGMQYSHSIIENLLYHVVGWTDWNLALNPEGGPNWVRNFVDSPIIVDITKDTFYKQPMFYHLGHFSKFIPEGSTRVGLVASQKNDLDAVALLHPDGSAVVVVLNRSSKDVPLTIKDPAVGFLETISPGYSIHTYLWRRQ

SEQ ID NO: 1267 - DNA, 1608 bp, synthetic construct
  misc_feature 1..1608: note = Variant of B-Glucocerebrosidase
  source 1..1608: mol_type = other DNA
atggagttttcttctcctagtagagaagaatgccccaagccactgagcagggtgagcatcatggctggatccctcacagggctgcttcttttgcaggcagtctcatgggcctctggagccaggccctgtattcccaagtcattcggctactcctcagtggtgtgtgtatgcaatgccacctattgtgacagtgtcgatcctctcactctccctgctctgggtaccttctcccggtatgagagcacaagaagtggaagacgcatggagctctcacagggccctatacaagctaaccgcactgggacaggtctgctgctgaccctccaacctgaacagaagtttcagaaagtcaagggatttggaggagccatgactgatgcagcagcactcaacatcttggccctgtctccaccagcccagaacctgctgttgaagtcctacttctcagaggaggggattgagtacaacatcatccgggttcccatggctagctgtgacttctccattaggacctatacatacgctgacacccccgatgattttcagctccataatttcagtctccctgaagaagacaccaaatggaagatacctctgattcacagagccttgcaactgtcccaaaggccagtgagcctcttcgcttctccctggactagtcctacatggctgaagactaatggtgcttacaatgggaagggctccctgaaaggacagccaggtgacatatatcatcagacatgggcccgctactttgtgaaattccttgatgcctatgcagagcacgggctccaattctgggcagtcaccgcagaaaacgagccctcagctgggctgctgtctggctacccctttcagtgcttgggctttactcctgagcatcaacgggacttcattgcccgggatttggggccaacactggccaacagcacccaccacaatgtaagactcctcattctggatgaccagaggctgctgctccctcattgggccaaggtggtgttgacaaacccagaagctgccaaatatgttcatggcatcgctgtccactggtacctggattttttggcccctgccaagtggactctgggagagacccacagactcttccccaataccacactgtttgcatcagaagcctgcgtggggagcaaattctgggagcagtctgttaggctgggttcctgggatcggggcatgcaatattcccatagtataatagagaacctcctctaccacgtggtaggatggacagactggaatctggctttgaacccagaaggaggccccaattgggtgcgcaactttgttgacagccccatcattgtggatatcacaaaggacaccttctacaaacagcctatgttctatcatctggggcactttagcaagttcattccagagggttccactagagtaggcttggttgcctcacagaagaatgatctggatgctgtggcactcctgcatcctgacgggagtgcagtggtggtagtactgaacaggtctagcaaagatgttcccttgactatcaaagacccagctgtgggctttctggaaaccatttcccctggatactctatccacacctatctctggagaagacag

SEQ ID NO: 1268 - protein, 536 aa, synthetic construct
  REGION 1..536: note = Variant of B-Glucocerebrosidase
MEFSSPSREECPKPLSRVSIMAGSLTGLLLLQAVSWASGARPCIPKSFGYSSVVCVCNATYCDSVDPLTLPALGTFSRYESTRSGRRMELSQGPIQANRTGTGLLLTLQPEQKFQKVKGFGGAMTDAAALNILALSPPAQNLLLKSYFSEEGIEYNIIRVPMASCDFSIRTYTYADTPDDFQLHNFSLPEEDTKWKIPLIHRALQLSQRPVSLFASPWTSPTWLKTNGAYNGKGSLKGQPGDIYHQTWARYFVKFLDAYAEHGLQFWAVTAENEPSAGLLSGYPFQCLGFTPEHQRDFIARDLGPTLANSTHHNVRLLILDDQRLLLPHWAKVVLTNPEAAKYVHGIAVHWYLDFLAPAKWTLGETHRLFPNTTLFASEACVGSKFWEQSVRLGSWDRGMQYSHSIIENLLYHVVGWTDWNLALNPEGGPNWVRNFVDSPIIVDITKDTFYKQPMFYHLGHFSKFIPEGSTRVGLVASQKNDLDAVALLHPDGSAVVVVLNRSSKDVPLTIKDPAVGFLETISPGYSIHTYLWRRQ

SEQ ID NO: 1269 - DNA, 1608 bp, synthetic construct
  misc_feature 1..1608: note = Variant of B-Glucocerebrosidase
  source 1..1608: mol_type = other DNA
atggagttttcttctcctagtagagaagaatgccccaagccactgagcagggtgagcatcatggctggatccctcacagggctgcttcttttgcaggcagtctcatgggcctctggagccaggccctgtattcccaagtcattcggctactcctcagtggtgtgtgtatgcaatgccacctattgtgacagtgtcgatcctctcactctccctgctctgggtaccttctcccggtatgagagcacaagaagtggaagacgcatggagctctcaatgggccctatacaggctaaccgcactgggacaggtctgctgctgaccctccaacctgaacagaagtttcagaaagtcaagggatttggaggagccatgactgatgcagcagcactcaacatcttggccctgtctccaccagcccagaacctgctgttgaagtcctacttctcagaggaggggattgagtacaacatcatccgggttcccatggctagctgtgacttctccattaggacctatacatacgctgacacccccgatgattttcagctccataatttcagtctccctgaagaagacacccagtggaagatacctctgattcacagagccttgcaactgtcccaaaggccagtgagcctcttcgcttctccctggactagtcctacatggctgaagactaatggtgcttacaatgggaagggctccctgaaaggacagccaggtgacatatatcatcagacatgggcccgctactttgtgaaattccttgatgcctatgcagagcacgggctccaattctgggcagtcaccgcagaaaacgagccctcagctgggctgctgtctggctacccctttcagtgcttgggctttactcctgagcatcaacgggacttcattgcccgggatttggggccaacactggccaacagcacccaccacaatgtaagactcctcattctggatgaccagaggctgctgctccctcattgggccaaggtggtgttgacaaacccagaagctgccaaatatgttcatggcatcgctgtccactggtacctggattttttggcccctgccaagtggactctgggagagacccacagactcttccccaataccacactgtttgcatcagaagcctgcgtggggagcaaattctgggagcagtctgttaggctgggttcctgggatcggggcatgcaatattcccatagtataatagagaacctcctctaccacgtggtaggatggacagactggaatctggctttgaacccagaaggaggccccaattgggtgcgcaactttgttgacagccccatcattgtggatatcacaaaggacaccttctacaaacagcctatgttctatcatctggggcactttagcaagttcattccagagggttccactagagtaggcttggttgcctcacagaagaatgatctggatgctgtggcactcctgcatcctgacgggagtgcagtggtggtagtactgaacaggtctagcaaagatgttcccttgactatcaaagacccagctgtgggctttctggaaaccatttcccctggatactctatccacacctatctctggagaagacag

SEQ ID NO: 1270 - protein, 536 aa, synthetic construct
  REGION 1..536: note = Variant of B-Glucocerebrosidase
MEFSSPSREECPKPLSRVSIMAGSLTGLLLLQAVSWASGARPCIPKSFGYSSVVCVCNATYCDSVDPLTLPALGTFSRYESTRSGRRMELSMGPIQANRTGTGLLLTLQPEQKFQKVKGFGGAMTDAAALNILALSPPAQNLLLKSYFSEEGIEYNIIRVPMASCDFSIRTYTYADTPDDFQLHNFSLPEEDTQWKIPLIHRALQLSQRPVSLFASPWTSPTWLKTNGAYNGKGSLKGQPGDIYHQTWARYFVKFLDAYAEHGLQFWAVTAENEPSAGLLSGYPFQCLGFTPEHQRDFIARDLGPTLANSTHHNVRLLILDDQRLLLPHWAKVVLTNPEAAKYVHGIAVHWYLDFLAPAKWTLGETHRLFPNTTLFASEACVGSKFWEQSVRLGSWDRGMQYSHSIIENLLYHVVGWTDWNLALNPEGGPNWVRNFVDSPIIVDITKDTFYKQPMFYHLGHFSKFIPEGSTRVGLVASQKNDLDAVALLHPDGSAVVVVLNRSSKDVPLTIKDPAVGFLETISPGYSIHTYLWRRQ

SEQ ID NO: 1271 - DNA, 1608 bp, synthetic construct
  misc_feature 1..1608: note = Variant of B-Glucocerebrosidase
  source 1..1608: mol_type = other DNA
atggagttttcttctcctagtagagaagaatgccccaagccactgagcagggtgagcatcatggctggatccctcacagggctgcttcttttgcaggcagtctcatgggcctctggagccaggccctgtattcccaagtcattcggctactcctcagtggtgtgtgtatgcaatgccacctattgtgacagtgtcgatcctctcactctccctgctctgggtaccttctcccggtatgagagcacaagaagtggaagacgcatggagctctcaatgggccctatacaggctaaccgcactgggacaggtctgctgctgaccctccaacctgaacagaagtttcagaaagtcaagggatttggaggagccatgactgatgcagcagcactcaacatcttggccctgtctccaccagcccagaacctgctgttgaagtcctacttctcagaggaggggattgagtacaacatcatccgggttcccatggctagctgtgacttctccattaggacctatacatacgctgacacccccgatgattttcagctccataatttcagtctccctgaagaagacaccaaatggaagatacctctgattcagagagccttgcaactgtcccaaaggccagtgagcctcttcgcttctccctggactagtcctacatggctgaagactaatggtgcttacaatgggaagggctccctgaaaggacagccaggtgacatatatcatcagacatgggcccgctactttgtgaaattccttgatgcctatgcagagcacgggctccaattctgggcagtcaccgcagaaaacgagccctcagctgggctgctgtctggctacccctttcagtgcttgggctttactcctgagcatcaacgggacttcattgcccgggatttggggccaacactggccaacagcacccaccacaatgtaagactcctcattctggatgaccagaggctgctgctccctcattgggccaaggtggtgttgacaaacccagaagctgccaaatatgttcatggcatcgctgtccactggtacctggattttttggcccctgccaagtggactctgggagagacccacagactcttccccaataccacactgtttgcatcagaagcctgcgtggggagcaaattctgggagcagtctgttaggctgggttcctgggatcggggcatgcaatattcccatagtataatagagaacctcctctaccacgtggtaggatggacagactggaatctggctttgaacccagaaggaggccccaattgggtgcgcaactttgttgacagccccatcattgtggatatcacaaaggacaccttctacaaacagcctatgttctatcatctggggcactttagcaagttcattccagagggttccactagagtaggcttggttgcctcacagaagaatgatctggatgctgtggcactcctgcatcctgacgggagtgcagtggtggtagtactgaacaggtctagcaaagatgttcccttgactatcaaagacccagctgtgggctttctggaaaccatttcccctggatactctatccacacctatctctggagaagacag

SEQ ID NO: 1272 - protein, 536 aa, synthetic construct
  REGION 1..536: note = Variant of B-Glucocerebrosidase
MEFSSPSREECPKPLSRVSIMAGSLTGLLLLQAVSWASGARPCIPKSFGYSSVVCVCNATYCDSVDPLTLPALGTFSRYESTRSGRRMELSMGPIQANRTGTGLLLTLQPEQKFQKVKGFGGAMTDAAALNILALSPPAQNLLLKSYFSEEGIEYNIIRVPMASCDFSIRTYTYADTPDDFQLHNFSLPEEDTKWKIPLIQRALQLSQRPVSLFASPWTSPTWLKTNGAYNGKGSLKGQPGDIYHQTWARYFVKFLDAYAEHGLQFWAVTAENEPSAGLLSGYPFQCLGFTPEHQRDFIARDLGPTLANSTHHNVRLLILDDQRLLLPHWAKVVLTNPEAAKYVHGIAVHWYLDFLAPAKWTLGETHRLFPNTTLFASEACVGSKFWEQSVRLGSWDRGMQYSHSIIENLLYHVVGWTDWNLALNPEGGPNWVRNFVDSPIIVDITKDTFYKQPMFYHLGHFSKFIPEGSTRVGLVASQKNDLDAVALLHPDGSAVVVVLNRSSKDVPLTIKDPAVGFLETISPGYSIHTYLWRRQ

SEQ ID NO: 1273 - DNA, 1608 bp, synthetic construct
  misc_feature 1..1608: note = Variant of B-Glucocerebrosidase
  source 1..1608: mol_type = other DNA
atggagttttcttctcctagtagagaagaatgccccaagccactgagcagggtgagcatcatggctggatccctcacagggctgcttcttttgcaggcagtctcatgggcctctggagccaggccctgtattcccaagtcattcggctactcctcagtggtgtgtgtatgcaatgccacctattgtgacagtgtcgatcctctcactctccctgctctgggtaccttctcccggtatgagagcacaagaagtggaagacgcatggagctctcaatgggccctatacaggctaaccgcactgggacaggtctgctgctgaccctccaacctgaacagaagtttcagaaagtcaagggatttggaggagccatgactgatgcagcagcactcaacatcttggccctgtctccaccagcccagaacctgctgttgaagtcctacttctcagaggaggggattgagtacaacatcatccgggttcccatggctagctgtgacttctccattaggacctatacatacgctgacacccccgatgattttcagctccataatttcagtctccctgaagaagacaccaaatggaagatacctctgattcacagagccttgcaactgtcccaaaggccagtgagcctcttcgcttctccctggactagtcctacatggctgaagactaatggtgcttacaatgggaagggctccctgaaaggacagccaggtgacatatatcatcagacatgggcccgctactttgtgaaattccttgatgcctatgcagagcacgggctccaattctgggcagtcaccgcagaaaacgagccctcagctgggctgctgtctggctacccctttcagtgcttgggctttactcctgagcatcaacgggacttcattgcccgggatttggggccaacactggccaacagcacccaccacaatgtaagactcctcattctggatgaccagaggctgctgctccctcattgggccaaggtggtgttgacaaacccagaagctgccaaatatgttcatggcatcgctgtccactggtacctggattttttggcccctcctaagtggactctgggagagacccacagactcttccccaataccacactgtttgcatcagaagcctgcgtggggagcaaattctgggagcagtctgttaggctgggttcctgggatcggggcatgcaatattcccatagtataatagagaacctcctctaccacgtggtaggatggacagactggaatctggctttgaacccagaaggaggccccaattgggtgcgcaactttgttgacagccccatcattgtggatatcacaaaggacaccttctacaaacagcctatgttctatcatctggggcactttagcaagttcattccagagggttccactagagtaggcttggttgcctcacagaagaatgatctggatgctgtggcactcctgcatcctgacgggagtgcagtggtggtagtactgaacaggtctagcaaagatgttcccttgactatcaaagacccagctgtgggctttctggaaaccatttcccctggatactctatccacacctatctctggagaagacag

SEQ ID NO: 1274 - protein, 536 aa, synthetic construct
  REGION 1..536: note = Variant of B-Glucocerebrosidase
MEFSSPSREECPKPLSRVSIMAGSLTGLLLLQAVSWASGARPCIPKSFGYSSVVCVCNATYCDSVDPLTLPALGTFSRYESTRSGRRMELSMGPIQANRTGTGLLLTLQPEQKFQKVKGFGGAMTDAAALNILALSPPAQNLLLKSYFSEEGIEYNIIRVPMASCDFSIRTYTYADTPDDFQLHNFSLPEEDTKWKIPLIHRALQLSQRPVSLFASPWTSPTWLKTNGAYNGKGSLKGQPGDIYHQTWARYFVKFLDAYAEHGLQFWAVTAENEPSAGLLSGYPFQCLGFTPEHQRDFIARDLGPTLANSTHHNVRLLILDDQRLLLPHWAKVVLTNPEAAKYVHGIAVHWYLDFLAPPKWTLGETHRLFPNTTLFASEACVGSKFWEQSVRLGSWDRGMQYSHSIIENLLYHVVGWTDWNLALNPEGGPNWVRNFVDSPIIVDITKDTFYKQPMFYHLGHFSKFIPEGSTRVGLVASQKNDLDAVALLHPDGSAVVVVLNRSSKDVPLTIKDPAVGFLETISPGYSIHTYLWRRQ

SEQ ID NO: 1275 - DNA, 1608 bp, synthetic construct
  misc_feature 1..1608: note = Variant of B-Glucocerebrosidase
  source 1..1608: mol_type = other DNA
atggagttttcttctcctagtagagaagaatgccccaagccactgagcagggtgagcatcatggctggatccctcacagggctgcttcttttgcaggcagtctcatgggcctctggagccaggccctgtattcccaagtcattcggctactcctcagtggtgtgtgtatgcaatgccacctattgtgacagtgtcgatcctctcactctccctgctctgggtaccttctcccggtatgagagcacaagaagtggaagacgcatggagctctcaatgggccctatagaggctaaccgcactgggacaggtctgctgctgaccctccaacctgaacagaagtttcagaaagtcaagggatttggaggagccatgactgatgcagcagcactcaacatcttggccctgtctccaccagcccagaacctgctgttgaagtcctacttctcagaggaggggattgagtacaacatcatccgggttcccatggctagctgtgacttctccattaggacctatacatacgctgacacccccgatgattttcagctccataatttcagtctccctgaagaagacaccaaatggaagatacctctgattcacagagccttgcaactgtcccaaaggccagtgagcctcttcgcttctccctggactagtcctacatggctgaagactaatggtgcttacaatgggaagggctccctgaaaggacagccaggtgacatatatcatcagacatgggcccgctactttgtgaaattccttgatgcctatgcagagcacgggctccaattctgggcagtcaccgcagaaaacgagccctcagctgggctgctgtctggctacccctttcagtgcttgggctttactcctgagcatcaacgggacttcattgcccgggatttggggccaacactggccaacagcacccaccacaatgtaagactcctcattctggatgaccagaggctgctgctccctcattgggccaaggtggtgttgacaaacccagaagctgccaaatatgttcatggcatcgctgtccactggtacctggattttttggcccctgccaagtggactctgggagagacccacagactcttccccaataccacactgtttgcatcagaagcctgcgtggggagcaaattctgggagcagtctgttaggctgggttcctgggatcggggcatgcaatattcccatagtataatagagaacctcctctaccacgtggtaggatggacagactggaatctggctttgaacccagaaggaggccccaattgggtgcgcaactttgttgacagccccatcattgtggatatcacaaaggacaccttctacaaacagcctatgttctatcatctggggcactttagcaagttcattccagagggttccactagagtaggcttggttgcctcacagaagaatgatctggatgctgtggcactcctgcatcctgacgggagtgcagtggtggtagtactgaacaggtctagcaaagatgttcccttgactatcaaagacccagctgtgggctttctggaaaccatttcccctggatactctatccacacctatctctggagaagacag

SEQ ID NO: 1276 - protein, 536 aa, synthetic construct
  REGION 1..536: note = Variant of B-Glucocerebrosidase
MEFSSPSREECPKPLSRVSIMAGSLTGLLLLQAVSWASGARPCIPKSFGYSSVVCVCNATYCDSVDPLTLPALGTFSRYESTRSGRRMELSMGPIEANRTGTGLLLTLQPEQKFQKVKGFGGAMTDAAALNILALSPPAQNLLLKSYFSEEGIEYNIIRVPMASCDFSIRTYTYADTPDDFQLHNFSLPEEDTKWKIPLIHRALQLSQRPVSLFASPWTSPTWLKTNGAYNGKGSLKGQPGDIYHQTWARYFVKFLDAYAEHGLQFWAVTAENEPSAGLLSGYPFQCLGFTPEHQRDFIARDLGPTLANSTHHNVRLLILDDQRLLLPHWAKVVLTNPEAAKYVHGIAVHWYLDFLAPAKWTLGETHRLFPNTTLFASEACVGSKFWEQSVRLGSWDRGMQYSHSIIENLLYHVVGWTDWNLALNPEGGPNWVRNFVDSPIIVDITKDTFYKQPMFYHLGHFSKFIPEGSTRVGLVASQKNDLDAVALLHPDGSAVVVVLNRSSKDVPLTIKDPAVGFLETISPGYSIHTYLWRRQ

SEQ ID NO: 1277 - DNA, 1608 bp, synthetic construct
  misc_feature 1..1608: note = Variant of B-Glucocerebrosidase
  source 1..1608: mol_type = other DNA
atggagttttcttctcctagtagagaagaatgccccaagccactgagcagggtgagcatcatggctggatccctcacagggctgcttcttttgcaggcagtctcatgggcctctggagccaggccctgtattcccaagtcattcggctactcctcagtggtgtgtgtatgcaatgccacctattgtgacagtgtcgatcctctcactctccctgctctgggtaccttctcccggtatgagagcacaagaagtggaagacgcatggagctctcagagggccctatagaggctaaccgcactgggacaggtctgctgctgaccctccaacctgaacagaagtttcagaaagtcaagggatttggaggagccatgactgatgcagcagcactcaacatcttggccctgtctccaccagcccagaacctgctgttgaagtcctacttctcagaggaggggattgagtacaacatcatccgggttcccatggctagctgtgacttctccattaggacctatacatacgctgacacccccgatgattttcagctccataatttcagtctccctgaagaagacaccaaatggaagatacctctgattcacagagccttgcaactgtcccaaaggccagtgagcctcttcgcttctccctggactagtcctacatggctgaagactaatggtgcttacaatgggaagggctccctgaaaggacagccaggtgacatatatcatcagacatgggcccgctactttgtgaaattccttgatgcctatgcagagcacgggctccaattctgggcagtcaccgcagaaaacgagccctcagctgggctgctgtctggctacccctttcagtgcttgggctttactcctgagcatcaacgggacttcattgcccgggatttggggccaacactggccaacagcacccaccacaatgtaagactcctcattctggatgaccagaggctgctgctccctcattgggccaaggtggtgttgacaaacccagaagctgccaaatatgttcatggcatcgctgtccactggtacctggattttttggcccctgccaagtggactctgggagagacccacagactcttccccaataccacactgtttgcatcagaagcctgcgctgggagcaaattctgggagcagtctgttaggctgggttcctgggatcggggcgaacaatattcccatagtataatagagaacctcctctaccacgtggtaggatggacagactggaatctggctttgaacccagaaggaggccccaattgggtgcgcaactttgttgacagccccatcattgtggatatcacaaaggacaccttctacaaacagcctatgttctatcatctggggcactttagcaagttcattccagagggttccactagagtaggcttggttgcctcacagaagaatgatctggaagctgtggcactcctgcatcctgacgggagcggggtggtggtagtactgaacaggtctagcaaagatgttcccttgactatcaaagacccagctgtgggctttctggaaaccatttcccctggatactctatccacacctatctctggagaagacag

SEQ ID NO: 1278 - protein, 536 aa, synthetic construct
  REGION 1..536: note = Variant of B-Glucocerebrosidase
MEFSSPSREECPKPLSRVSIMAGSLTGLLLLQAVSWASGARPCIPKSFGYSSVVCVCNATYCDSVDPLTLPALGTFSRYESTRSGRRMELSEGPIEANRTGTGLLLTLQPEQKFQKVKGFGGAMTDAAALNILALSPPAQNLLLKSYFSEEGIEYNIIRVPMASCDFSIRTYTYADTPDDFQLHNFSLPEEDTKWKIPLIHRALQLSQRPVSLFASPWTSPTWLKTNGAYNGKGSLKGQPGDIYHQTWARYFVKFLDAYAEHGLQFWAVTAENEPSAGLLSGYPFQCLGFTPEHQRDFIARDLGPTLANSTHHNVRLLILDDQRLLLPHWAKVVLTNPEAAKYVHGIAVHWYLDFLAPAKWTLGETHRLFPNTTLFASEACAGSKFWEQSVRLGSWDRGEQYSHSIIENLLYHVVGWTDWNLALNPEGGPNWVRNFVDSPIIVDITKDTFYKQPMFYHLGHFSKFIPEGSTRVGLVASQKNDLEAVALLHPDGSGVVVVLNRSSKDVPLTIKDPAVGFLETISPGYSIHTYLWRRQ

SEQ ID NO: 1279 - DNA, 1608 bp, synthetic construct
  misc_feature 1..1608: note = Variant of B-Glucocerebrosidase
  source 1..1608: mol_type = other DNA
atggagttttcttctcctagtagagaagaatgccccaagccactgagcagggtgagcatcatggctggatccctcacagggctgcttcttttgcaggcagtctcatgggcctctggagccaggccctgtattcccaagtcattcggctactcctcagtggtgtgtgtatgcaatgccacctattgtgacagtgtcgatcctctcactctccctgctctgggtaccttctcccggtatgagagcacaagaagtggaagacgcatggagctctcaatgggccctatacaggctaaccgcactgggacaggtctgctgctgaccctccaacctgaacagaagtttcagaaagtcaagggatttggaggagccatgactgatgcagcagcactcaacatcttggccctgtctccaccagcccagaacctgctgttgaagtcctacttctcagaggaggggattgagtacaacatcatccgggttcccatggctagctgtgacttctccattaggacctatacatacgctgacacccccgatgattttcagctccataatttcagtctccctgaagaagacaccaaatggaagatacctctgattcacagagccttgcaactgtcccaaaggccagtgagcctcttcgcttctccctggactagtcctacatggctgaagactaatggtgcttacaatgggaagggctccctgaaaggacagccaggtgacatatatcatcagacatgggcccgctactttgtgaaattccttgatgcctatgcagagcacgggctccaattctgggcagtcaccgcagaaaacgagccctcagctgggctgctgtctggctacccctttcagtgcttgggctttactcctgagcatcaacgggacttcattgcccgggatttggggccaacactggccaacagcacccaccacaatgtaagactcctcattctggatgaccagaggctgctgctccctcattgggccaaggtggtgttgacaaacccagaagctgccaaatatgttcatggcatcgctgtccactggtacctggattttttggcccctgccaagtggactctgggagagacccacagactcttccccaataccacactgtttgcatcagaagcctgcgctgggagcaaattctgggagcagtctgttaggctgggttcctgggatcggggcatgcaatattcccatagtataatagagaacctcctctaccacgtggtaggatggacagactggaatctggctttgaacccagaaggaggccccaattgggtgcgcaactttgttgacagccccatcattgtggatatcacaaaggacaccttctacaaacagcctatgttctatcatctggggcactttagcaagttcattccagagggttccactagagtaggcttggttgcctcacagaagaatgatctggatgctgtggcactcctgcatcctgacgggagcggggtggtggtagtactgaacaggtctagcaaagatgttcccttgactatcaaagacccagctgtgggctttctggaaaccatttcccctggatactctatccacacctatctctggagaagacag

SEQ ID NO: 1280 - protein, 536 aa, synthetic construct
  REGION 1..536: note = Variant of B-Glucocerebrosidase
MEFSSPSREECPKPLSRVSIMAGSLTGLLLLQAVSWASGARPCIPKSFGYSSVVCVCNATYCDSVDPLTLPALGTFSRYESTRSGRRMELSMGPIQANRTGTGLLLTLQPEQKFQKVKGFGGAMTDAAALNILALSPPAQNLLLKSYFSEEGIEYNIIRVPMASCDFSIRTYTYADTPDDFQLHNFSLPEEDTKWKIPLIHRALQLSQRPVSLFASPWTSPTWLKTNGAYNGKGSLKGQPGDIYHQTWARYFVKFLDAYAEHGLQFWAVTAENEPSAGLLSGYPFQCLGFTPEHQRDFIARDLGPTLANSTHHNVRLLILDDQRLLLPHWAKVVLTNPEAAKYVHGIAVHWYLDFLAPAKWTLGETHRLFPNTTLFASEACAGSKFWEQSVRLGSWDRGMQYSHSIIENLLYHVVGWTDWNLALNPEGGPNWVRNFVDSPIIVDITKDTFYKQPMFYHLGHFSKFIPEGSTRVGLVASQKNDLDAVALLHPDGSGVVVVLNRSSKDVPLTIKDPAVGFLETISPGYSIHTYLWRRQ

SEQ ID NO: 1281 - DNA, 1608 bp, synthetic construct
  misc_feature 1..1608: note = Variant of B-Glucocerebrosidase
  source 1..1608: mol_type = other DNA
atggagttttcttctcctagtagagaagaatgccccaagccactgagcagggtgagcatcatggctggatccctcacagggctgcttcttttgcaggcagtctcatgggcctctggagccaggccctgtattcccaagtcattcggctactcctcagtggtgtgtgtatgcaatgccacctattgtgacagtgtcgatcctctcactctccctgctctgggtaccttctcccggtatgagagcacaagaagtggaagacgcatggagctctcaatgggccctatacaggctaaccgcactgggacaggtctgctgctgaccctccaacctgaacagaagtttcagaaagtcaagggatttggaggagccatgactgatgcagcagcactcaacatcttggccctgtctccaccagcccagaacctgctgttgaagtcctacttctcagaggaggggattgagtacaacatcatccgggttcccatggctagctgtgacttctccattaggacctatacatacgctgacacccccgatgattttcagctccataatttcagtctccctgaagaagacaccaaatggaagatacctctgattcacagagccttgcaactgtcccaaaggccagtgagcctcttcgcttctccctggactagtcctacatggctgaagactaatggtgcttacaatgggaagggctccctgaaaggacagccaggtgacatatatcatcagacatgggcccgctactttgtgaaattccttgatgcctatgcagagcacgggctccaattctgggcagtcaccgcagaaaacgagccctcagctgggctgctgtctggctacccctttcagtgcttgggctttactcctgagcatcaacgggacttcattgcccgggatttggggccaacactggccaacagcacccaccacaatgtaagactcctcattctggatgaccagaggctgctgctccctcattgggccaaggtggtgttgacaaacccagaagctgccaaatatgttcatggcatcgctgtccactggtacctggattttttggcccctgccaagtggactctgggagagacccacagactcttccccaataccacactgtttgcatcagaagcctgcgctgggagcaaattctgggagcagtctgttaggctgggttcctgggatcggggcatgcaatattcccatagtataatagagaacctcctctaccacgtggtaggatggacagactggaatctggctttgaacccagaaggaggccccaattgggtgcgcaactttgttgacagccccatcattgtggatatcacaaaggacaccttctacaaacagcctatgttctatcatctggggcactttagcaagttcattccagagggttccactagagtaggcttggttgcctcacagaagaatgatctggatgctgtggcactcctgcatcctgacgggagtgcagtggtggtagtactgaacaggtctagcaaagatgttcccttgactatcaaagacccagctgtgggctttctggaaaccatttcccctggatactctatccacacctatctctggagaagacag

SEQ ID NO: 1282 - protein, 536 aa, synthetic construct
  REGION 1..536: note = Variant of B-Glucocerebrosidase
MEFSSPSREECPKPLSRVSIMAGSLTGLLLLQAVSWASGARPCIPKSFGYSSVVCVCNATYCDSVDPLTLPALGTFSRYESTRSGRRMELSMGPIQANRTGTGLLLTLQPEQKFQKVKGFGGAMTDAAALNILALSPPAQNLLLKSYFSEEGIEYNIIRVPMASCDFSIRTYTYADTPDDFQLHNFSLPEEDTKWKIPLIHRALQLSQRPVSLFASPWTSPTWLKTNGAYNGKGSLKGQPGDIYHQTWARYFVKFLDAYAEHGLQFWAVTAENEPSAGLLSGYPFQCLGFTPEHQRDFIARDLGPTLANSTHHNVRLLILDDQRLLLPHWAKVVLTNPEAAKYVHGIAVHWYLDFLAPAKWTLGETHRLFPNTTLFASEACAGSKFWEQSVRLGSWDRGMQYSHSIIENLLYHVVGWTDWNLALNPEGGPNWVRNFVDSPIIVDITKDTFYKQPMFYHLGHFSKFIPEGSTRVGLVASQKNDLDAVALLHPDGSAVVVVLNRSSKDVPLTIKDPAVGFLETISPGYSIHTYLWRRQ

SEQ ID NO: 1283 - DNA, 1608 bp, synthetic construct
  misc_feature 1..1608: note = Variant of B-Glucocerebrosidase
  source 1..1608: mol_type = other DNA
atggagttttcttctcctagtagagaagaatgccccaagccactgagcagggtgagcatcatggctggatccctcacagggctgcttcttttgcaggcagtctcatgggcctctggagccaggccctgtattcccaagtcattcggctactcctcagtggtgtgtgtatgcaatgccacctattgtgacagtgtcgatcctctcactctccctgctctgggtaccttctcccggtatgagagcacaagaagtggaagacgcatggagctctcagagggccctatacaagctaaccgcactgggacaggtctgctgctgaccctccaacctgaacagaagtttcagaaagtcaagggatttggaggagccatgactgatgcagcagcactcaacatcttggccctgtctccaccagcccagaacctgctgttgaagtcctacttctcagaggaggggattgagtacaacatcatccgggttcccatggctagctgtgacttctccattaggacctatacatacgctgacacccccgatgattttcagctccataatttcagtctccctgaagaagacaccaaatggaagatacctctgattcacagagccttgcaactgtcccaaaggccagtgagcctcttcgcttctccctggactagtcctacatggctgaagactaatggtgcttacaatgggaagggctccctgaaaggacagccaggtgacatatatcatcagacatgggcccgctactttgtgaaattccttgatgcctatgcagagcacgggctccaattctgggcagtcaccgcagaaaacgagccctcagctgggctgctgtctggctacccctttcagtgcttgggctttactcctgagcatcaacgggacttcattgcccgggatttggggccaacactggccaacagcacccaccacaatgtaagactcctcattctggatgaccagaggctgctgctccctcattgggccaaggtggtgttgacaaacccagaagctgccaaatatgttcatggcatcgctgtccactggtacctggattttttggcccctgccaagtggactctgggagagacccacagactcttccccaataccacactgtttgcatcagaagcctgcgctgggagcaaattctgggagcagtctgttaggctgggttcctgggatcggggcatgcaatattcccatagtataatagagaacctcctctaccacgtggtaggatggacagactggaatctggctttgaacccagaaggaggccccaattgggtgcgcaactttgttgacagccccatcattgtggatatcacaaaggacaccttctacaaacagcctatgttctatcatctggggcactttagcaagttcattccagagggttccactagagtaggcttggttgcctcacagaagaatgatctggatgctgtggcactcctgcatcctgacgggagtgcagtggtggtagtactgaacaggtctagcaaagatgttcccttgactatcaaagacccagctgtgggctttctggaaaccatttcccctggatactctatccacacctatctctggagaagacag

SEQ ID NO: 1284 - protein, 536 aa, synthetic construct
  REGION 1..536: note = Variant of B-Glucocerebrosidase
MEFSSPSREECPKPLSRVSIMAGSLTGLLLLQAVSWASGARPCIPKSFGYSSVVCVCNATYCDSVDPLTLPALGTFSRYESTRSGRRMELSEGPIQANRTGTGLLLTLQPEQKFQKVKGFGGAMTDAAALNILALSPPAQNLLLKSYFSEEGIEYNIIRVPMASCDFSIRTYTYADTPDDFQLHNFSLPEEDTKWKIPLIHRALQLSQRPVSLFASPWTSPTWLKTNGAYNGKGSLKGQPGDIYHQTWARYFVKFLDAYAEHGLQFWAVTAENEPSAGLLSGYPFQCLGFTPEHQRDFIARDLGPTLANSTHHNVRLLILDDQRLLLPHWAKVVLTNPEAAKYVHGIAVHWYLDFLAPAKWTLGETHRLFPNTTLFASEACAGSKFWEQSVRLGSWDRGMQYSHSIIENLLYHVVGWTDWNLALNPEGGPNWVRNFVDSPIIVDITKDTFYKQPMFYHLGHFSKFIPEGSTRVGLVASQKNDLDAVALLHPDGSAVVVVLNRSSKDVPLTIKDPAVGFLETISPGYSIHTYLWRRQ

SEQ ID NO: 1285 - DNA, 1608 bp, synthetic construct
  misc_feature 1..1608: note = Variant of B-Glucocerebrosidase
  source 1..1608: mol_type = other DNA
atggagttttcttctcctagtagagaagaatgccccaagccactgagcagggtgagcatcatggctggatccctcacagggctgcttcttttgcaggcagtctcatgggcctctggagccaggccctgtattcccaagtcattcggctactcctcagtggtgtgtgtatgcaatgccacctattgtgacagtgtcgatcctctcactctcaccgctctgggtaccttctcccggtatgagagcacaagaagtggaagacgcatggagctctcaatgggccctatacaggctaaccgcactgggacaggtctgctgctgaccctccaacctgaacagaagtttcagaaagtcaagggatttggaggagccatgactgatgcagcagcactcaacatcttggccctgtctccaccagcccagaacctgctgttgaagtcctacttctcagaggaggggattgagtacaacatcatccgggttcccatggctagctgtgacttctccattaggacctatacatacgatgacacccccgatgattttcagctccataatttcagtctccctgaagaagacaccaaatggaagatacctctgattcacagagccttgcaactgtcccaaaggccagtgagcctcttcgcttctccctggactagtcctacatggctgaagactaatggtgcttacaatgggaagggctccctgaaaggacagccaggtgacatatatcatcagacatgggcccgctactttgtgaaattccttgatgcctatgcagagcacgggctccaattctgggcagtcaccgcagaaaacgagccctcagctgggctgctgtctggctacccctttcagtgcttgggctttactcctgagcatcaacgggacttcattgcccgggatttggggccaacactggccaacagcacccaccacaatgtaagactcctcattctggatgaccagagggtcctgctccctcattgggccaaggtggtgttgacaaacccagaagctgccaaatatgttcatggcatcgctgtccactggtacctggattttttggcccctgccaagtggactctgggagagacccacagactcttccccaataccacactgtttgcatcagaagcctgcgtggggagccacttctgggagcagtctgttaggctgggttcctgggatcggggcatgcaatattcccatagtataatagagaacctcctctaccacgtggtaggatggacagactggaatctggctttgaacccagaaggaggccccaattgggtgcgcaactttgttgacagccccatcattgtggatatcacaaaggacaccttctacaaacagcctatgttctatcatctggggcactttagcaagttcattccagagggttccactagagtaggcttggttgcctcacagaagaatgatctggatgctgtggcactcctgcatcctgacgggagtgcagtggtggtagtactgaacaggtctagcaaagatgttcccttgactatcaaagacccagctgtgggctttctggaaaccatttcccctggatactctatccacacctatctctggagaagacag

SEQ ID NO: 1286 - protein, 536 aa, synthetic construct
  REGION 1..536: note = Variant of B-Glucocerebrosidase
MEFSSPSREECPKPLSRVSIMAGSLTGLLLLQAVSWASGARPCIPKSFGYSSVVCVCNATYCDSVDPLTLTALGTFSRYESTRSGRRMELSMGPIQANRTGTGLLLTLQPEQKFQKVKGFGGAMTDAAALNILALSPPAQNLLLKSYFSEEGIEYNIIRVPMASCDFSIRTYTYDDTPDDFQLHNFSLPEEDTKWKIPLIHRALQLSQRPVSLFASPWTSPTWLKTNGAYNGKGSLKGQPGDIYHQTWARYFVKFLDAYAEHGLQFWAVTAENEPSAGLLSGYPFQCLGFTPEHQRDFIARDLGPTLANSTHHNVRLLILDDQRVLLPHWAKVVLTNPEAAKYVHGIAVHWYLDFLAPAKWTLGETHRLFPNTTLFASEACVGSHFWEQSVRLGSWDRGMQYSHSIIENLLYHVVGWTDWNLALNPEGGPNWVRNFVDSPIIVDITKDTFYKQPMFYHLGHFSKFIPEGSTRVGLVASQKNDLDAVALLHPDGSAVVVVLNRSSKDVPLTIKDPAVGFLETISPGYSIHTYLWRRQ

SEQ ID NO: 1287 - DNA, 1608 bp, synthetic construct
  misc_feature 1..1608: note = Variant of B-Glucocerebrosidase
  source 1..1608: mol_type = other DNA
atggagttttcttctcctagtagagaagaatgccccaagccactgagcagggtgagcatcatggctggatccctcacagggctgcttcttttgcaggcagtctcatgggcctctggagccaggccctgtattcccaagtcattcggctactcctcagtggtgtgtgtatgcaatgccacctattgtgacagtgtcgatcctctcactctccctgctctgggtaccttctcccggtatgagagcacaagaagtggaagacgcatggagctctcaatgggccctatacaggctaaccgcactgggacaggtctgctgctgaccctccaacctgaacagaagtttcagaaagtcaagggatttggaggagccatgactgatgcagcagcactcaacatcttggccctgtctccaccagcccagaacctgctgttgaagtcctacttctcagaggaggggattgagtacaacatcatccgggttcccatggctagctgtgacttctccattaggacctatacatacgctgacacccccgatgattttcagctccataatttcagtctccctgaagaagacaccaaatggaagatacctctgattcacagagccttgcaactgtcccaaaggccagtgagcctcttcgcttctccctggactagtcctacatggctgaagactaatggtgcttacaatgggaagggctccctgaaaggacagccaggtgacatatatcatcagacatgggcccgctactttgtgaaattccttgatgcctatgcagagcacgggctccaattctgggcagtcaccgcagaaaacgagccctcagctgggctgctgtctggctacccctttcagtgcttgggctttactcctgagcatcaacgggacttcattgcccgggatttggggccaacactggccaacagcacccaccacaatgtaagactcctcattctggatgaccagagggtcctgctccctcattgggccaaggtggtgttgacaaacccagaagctgccaaatatgttcatggcatcgctgtccactggtacctggattttttggcccctgccaagtggactctgggagagacccacagactcttccccaataccacactgtttgcatcagaagcctgcgtggggagccacttctgggagcagtctgttaggctgggttcctgggatcggggcatgcaatattcccatagtataatagagaacctcctctaccacgtggtaggatggacagactggaatctggctttgaacccagaaggaggccccaattgggtgcgcaactttgttgacagccccatcattgtggatatcacaaaggacaccttctacaaacagcctatgttctatcatctggggcactttagcaagttcattccagagggttccactagagtaggcttggttgcctcacagaagaatgatctggatgctgtggcactcctgcatcctgacgggagtgcagtggtggtagtactgaacaggtctagcaaagatgttcccttgactatcaaagacccagctgtgggctttctggaaaccatttcccctggatactctatccacacctatctctggagaagacag

SEQ ID NO: 1288 - protein, 536 aa, synthetic construct
  REGION 1..536: note = Variant of B-Glucocerebrosidase
MEFSSPSREECPKPLSRVSIMAGSLTGLLLLQAVSWASGARPCIPKSFGYSSVVCVCNATYCDSVDPLTLPALGTFSRYESTRSGRRMELSMGPIQANRTGTGLLLTLQPEQKFQKVKGFGGAMTDAAALNILALSPPAQNLLLKSYFSEEGIEYNIIRVPMASCDFSIRTYTYADTPDDFQLHNFSLPEEDTKWKIPLIHRALQLSQRPVSLFASPWTSPTWLKTNGAYNGKGSLKGQPGDIYHQTWARYFVKFLDAYAEHGLQFWAVTAENEPSAGLLSGYPFQCLGFTPEHQRDFIARDLGPTLANSTHHNVRLLILDDQRVLLPHWAKVVLTNPEAAKYVHGIAVHWYLDFLAPAKWTLGETHRLFPNTTLFASEACVGSHFWEQSVRLGSWDRGMQYSHSIIENLLYHVVGWTDWNLALNPEGGPNWVRNFVDSPIIVDITKDTFYKQPMFYHLGHFSKFIPEGSTRVGLVASQKNDLDAVALLHPDGSAVVVVLNRSSKDVPLTIKDPAVGFLETISPGYSIHTYLWRRQ

SEQ ID NO: 1289 - DNA, 1608 bp, synthetic construct
  misc_feature 1..1608: note = Variant of B-Glucocerebrosidase
  source 1..1608: mol_type = other DNA
atggagttttcttctcctagtagagaagaatgccccaagccactgagcagggtgagcatcatggctggatccctcacagggctgcttcttttgcaggcagtctcatgggcctctggagccaggccctgtattcccaagtcattcggctactcctcagtggtgtgtgtatgcaatgccacctattgtgacagtgtcgatcctctcactctcaccgctctgggtaccttctcccggtatgagagcacaagaagtggaagacgcatggagctctcaatgggccctatacaggctaaccgcactgggacaggtctgctgctgaccctccaacctgaacagaagtttcagaaagtcaagggatttggaggagccatgactgatgcagcagcactcaacatcttggccctgtctccaccagcccagaacctgctgttgaagtcctacttctcagaggaggggattgagtacaacatcatccgggttcccatggctagctgtgacttctccattaggacctatacatacgctgacacccccgatgattttcagctccataatttcagtctccctgaagaagacaccaaatggaagatacctctgattcacagagccttgcaactgtcccaaaggccagtgagcctcttcgcttctccctggactagtcctacatggctgaagactaatggtgcttacaatgggaagggctccctgaaaggacagccaggtgacatatatcatcagacatgggcccgctactttgtgaaattccttgatgcctatgcagagcacgggctccaattctgggcagtcaccgcagaaaacgagccctcagctgggctgctgtctggctacccctttcagtgcttgggctttactcctgagcatcaacgggacttcattgcccgggatttggggccaacactggccaacagcacccaccacaatgtaagactcctcattctggatgaccagagggtcctgctccctcattgggccaaggtggtgttgacaaacccagaagctgccaaatatgttcatggcatcgctgtccactggtacctggattttttggcccctgccaagtggactctgggagagacccacagactcttccccaataccacactgtttgcatcagaagcctgcgtggggagcaaattctgggagcagtctgttaggctgggttcctgggatcggggcatgcaatattcccatagtataatagagaacctcctctaccacgtggtaggatggacagactggaatctggctttgaacccagaaggaggccccaattgggtgcgcaactttgttgacagccccatcattgtggatatcacaaaggacaccttctacaaacagcctatgttctatcatctggggcactttagcaagttcattccagagggttccactagagtaggcttggttgcctcacagaagaatgatctggatgctgtggcactcctgcatcctgacgggagtgcagtggtggtagtactgaaccagtctagcaaagatgttcccttgactatcaaagacccagctgtgggctttctggaaaccatttcccctggatactctatccacacctatctctggagaagacag

SEQ ID NO: 1290 - protein, 536 aa, synthetic construct
  REGION 1..536: note = Variant of B-Glucocerebrosidase
MEFSSPSREECPKPLSRVSIMAGSLTGLLLLQAVSWASGARPCIPKSFGYSSVVCVCNATYCDSVDPLTLTALGTFSRYESTRSGRRMELSMGPIQANRTGTGLLLTLQPEQKFQKVKGFGGAMTDAAALNILALSPPAQNLLLKSYFSEEGIEYNIIRVPMASCDFSIRTYTYADTPDDFQLHNFSLPEEDTKWKIPLIHRALQLSQRPVSLFASPWTSPTWLKTNGAYNGKGSLKGQPGDIYHQTWARYFVKFLDAYAEHGLQFWAVTAENEPSAGLLSGYPFQCLGFTPEHQRDFIARDLGPTLANSTHHNVRLLILDDQRVLLPHWAKVVLTNPEAAKYVHGIAVHWYLDFLAPAKWTLGETHRLFPNTTLFASEACVGSKFWEQSVRLGSWDRGMQYSHSIIENLLYHVVGWTDWNLALNPEGGPNWVRNFVDSPIIVDITKDTFYKQPMFYHLGHFSKFIPEGSTRVGLVASQKNDLDAVALLHPDGSAVVVVLNQSSKDVPLTIKDPAVGFLETISPGYSIHTYLWRRQ

SEQ ID NO: 1291 - DNA, 1608 bp, synthetic construct
  misc_feature 1..1608: note = Variant of B-Glucocerebrosidase
  source 1..1608: mol_type = other DNA
atggagttttcttctcctagtagagaagaatgccccaagccactgagcagggtgagcatcatggctggatccctcacagggctgcttcttttgcaggcagtctcatgggcctctggagccaggccctgtattcccaagtcattcggctactcctcagtggtgtgtgtatgcaatgccacctattgtgacagtgtcgatcctctcactctcaccgctctgggtaccttctcccggtatgagagcacaagaagtggaagacgcatggagctctcaatgggccctatacaggctaaccgcactgggacaggtctgctgctgaccctccaacctgaacagaagtttcagaaagtcaagggatttggaggagccatgactgatgcagcagcactcaacatcttggccctgtctccaccagcccagaacctgctgttgaagtcctacttctcagaggaggggattgagtacaacatcatccgggttcccatggctagctgtgacttctccattaggacctatacatacgatgacacccccgatgattttcagctccataatttcagtctccctgaagaagacaccaaatggaagatacctctgattcacagagccttgcaactgtcccaaaggccagtgagcctcttcgcttctccctggactagtcctacatggctgaagactaatggtgcttacaatgggaagggctccctgaaaggacagccaggtgacatatatcatcagacatgggcccgctactttgtgaaattccttgatgcctatgcagagcacgggctccaattctgggcagtcaccgcagaaaacgagccctcagctgggctgctgtctggctacccctttcagtgcttgggctttactcctgagcatcaacgggacttcattgcccgggatttggggccaacactggccaacagcacccaccacaatgtaagactcctcattctggatgaccagagggtcctgctccctcattgggccaaggtggtgttgacaaacccagaagctgccaaatatgttcatggcatcgctgtccactggtacctggattttttggcccctgccaagtggactctgggagagacccacagactcttccccaataccacactgtttgcatcagaagcctgcgtggggagccacttctgggagcagtctgttaggctgggttcctgggatcggggcatgcaatattcccatagtataatagagaacctcctctaccacgtggtaggatggacagactggaatctggctttgaacccagaaggaggccccaattgggtgcgcaactttgttgacagccccatcattgtggatatcacaaaggacaccttctacaaacagcctatgttctatcatctggggcactttagcaagttcattccagagggttccactagagtaggcttggttgcctcacagaagaatgatctggatgctgtggcactcctgcatcctgacgggagtgcagtggtggtagtactgaaccagtctagcaaagatgttcccttgactatcaaagacccagctgtgggctttctggaaaccatttcccctggatactctatccacacctatctctggagaagacag

SEQ ID NO: 1292 - protein, 536 aa, synthetic construct
  REGION 1..536: note = Variant of B-Glucocerebrosidase
MEFSSPSREECPKPLSRVSIMAGSLTGLLLLQAVSWASGARPCIPKSFGYSSVVCVCNATYCDSVDPLTLTALGTFSRYESTRSGRRMELSMGPIQANRTGTGLLLTLQPEQKFQKVKGFGGAMTDAAALNILALSPPAQNLLLKSYFSEEGIEYNIIRVPMASCDFSIRTYTYDDTPDDFQLHNFSLPEEDTKWKIPLIHRALQLSQRPVSLFASPWTSPTWLKTNGAYNGKGSLKGQPGDIYHQTWARYFVKFLDAYAEHGLQFWAVTAENEPSAGLLSGYPFQCLGFTPEHQRDFIARDLGPTLANSTHHNVRLLILDDQRVLLPHWAKVVLTNPEAAKYVHGIAVHWYLDFLAPAKWTLGETHRLFPNTTLFASEACVGSHFWEQSVRLGSWDRGMQYSHSIIENLLYHVVGWTDWNLALNPEGGPNWVRNFVDSPIIVDITKDTFYKQPMFYHLGHFSKFIPEGSTRVGLVASQKNDLDAVALLHPDGSAVVVVLNQSSKDVPLTIKDPAVGFLETISPGYSIHTYLWRRQ

SEQ ID NO: 1293 - DNA, 1608 bp, synthetic construct
  misc_feature 1..1608: note = Variant of B-Glucocerebrosidase
  source 1..1608: mol_type = other DNA
atggagttttcttctcctagtagagaagaatgccccaagccactgagcagggtgagcatcatggctggatccctcacagggctgcttcttttgcaggcagtctcatgggcctctggagccaggccctgtattcccaagtcattcggctactcctcagtggtgtgtgtatgcaatgccacctattgtgacagtgtcgatcctctcactctccctgctctgggtaccttctcccggtatgagagcacaagaagtggaagacgcatggagctctcaatgggccctatacaggctaaccgcactgggacaggtctgctgctgaccctccaacctgaacagaagtttcagaaagtcaagggatttggaggagccatgactgatgcagcagcactcaacatcttggccctgtctccaccagcccagaacctgctgttgaagtcctacttctcagaggaggggattgagtacaacatcatccgggttcccatggctagctgtgacttctccattaggacctatacatacgctgacacccccgatgattttcagctccataatttcagtctccctgaagaagacaccaaatggaagatacctctgattcaccaggccttgcaactgtcccaaaggccagtgagcctcttcgcttctccctggactagtcctacatggctgaagactaatggtgcttacaatgggaagggctccctgaaaggacagccaggtgacatatatcatcagacatgggcccgctactttgtgaaattccttgatgcctatgcagagcacgggctccaattctgggcagtcaccgcagaaaacgagccctcagctgggctgctgtctggctacccctttcagtgcttgggctttactcctgagcatcaacgggacttcattgcccgggatttggggccaacactggccaacagcacccaccacaatgtaagactcctcattctggatgaccagagggtcctgctccctcattgggccaaggtggtgttgacaaacccagaagctgccaaatatgttcatggcatcgctgtccactggtacctggattttttggcccctgccaagtggactctgggagagacccacagactcttccccaataccacactgtttgcatcagaagcctgcgtggggagcaacttctgggagcagtctgttaggctgggttcctgggatcggggcatgcaatattcccatagtataatagagaacctcctctaccacgtggtaggatggacagactggaatctggctttgaacccagaaggaggccccaattgggtgcgcaactttgttgacagccccatcattgtggatatcacaaaggacaccttctacaaacagcctatgttctatcatctggggcactttagcaagttcattccagagggttccactagagtaggcttggttgcctcacagaagaatgatctggatgctgtggcactcctgcatcctgacgggagtgcagtggtggtagtactgaacaggtctagcaaagatgttcccttgactatcaaagacccagctgtgggctttctggaaaccatttcccctggatactctatccacacctatctctggagaagacag

SEQ ID NO: 1294 - protein, 536 aa, synthetic construct
  REGION 1..536: note = Variant of B-Glucocerebrosidase
MEFSSPSREECPKPLSRVSIMAGSLTGLLLLQAVSWASGARPCIPKSFGYSSVVCVCNATYCDSVDPLTLPALGTFSRYESTRSGRRMELSMGPIQANRTGTGLLLTLQPEQKFQKVKGFGGAMTDAAALNILALSPPAQNLLLKSYFSEEGIEYNIIRVPMASCDFSIRTYTYADTPDDFQLHNFSLPEEDTKWKIPLIHQALQLSQRPVSLFASPWTSPTWLKTNGAYNGKGSLKGQPGDIYHQTWARYFVKFLDAYAEHGLQFWAVTAENEPSAGLLSGYPFQCLGFTPEHQRDFIARDLGPTLANSTHHNVRLLILDDQRVLLPHWAKVVLTNPEAAKYVHGIAVHWYLDFLAPAKWTLGETHRLFPNTTLFASEACVGSNFWEQSVRLGSWDRGMQYSHSIIENLLYHVVGWTDWNLALNPEGGPNWVRNFVDSPIIVDITKDTFYKQPMFYHLGHFSKFIPEGSTRVGLVASQKNDLDAVALLHPDGSAVVVVLNRSSKDVPLTIKDPAVGFLETISPGYSIHTYLWRRQ

SEQ ID NO: 1295 - DNA, 1608 bp, synthetic construct
  misc_feature 1..1608: note = Variant of B-Glucocerebrosidase
  source 1..1608: mol_type = other DNA
atggagttttcttctcctagtagagaagaatgccccaagccactgagcagggtgagcatcatggctggatccctcacagggctgcttcttttgcaggcagtctcatgggcctctggagccaggccctgtattcccaagtcattcggctactcctcagtggtgtgtgtatgcaatgccacctattgtgacagtgtcgatcctctcactctccctgctctgggtaccttctcccggtatgagagcacaagaagtggaagacgcatggagctctcaatgggccctatacagcagaaccgcacagggacaggtctgctgctgaccctccaacctgaacagaagtttcagaaagtcaagggatttggaggagccatgactgatgcagcagcactcaacatcttggccctgtctccaccagcccagaacctgctgttgaagtcctacttctcagaggaggggattgagtacaacatcatccgggttcccatggctagctgtgacttctccattaggacctatacatacgatgacacccccgatgattttcagctccataatttcagtctccctgaagaagacaccaaatggaagatacctctgattcacagagccttgcaactgtcccaaaggccagtgagcctcttcgcttctccctggactagtcctacatggctgaagactaatggtgcttacaatgggaagggctccctgaaaggacagccaggtgacatatatcatcagacatgggcccgctactttgtgaaattccttgatgcctatgcagagcacgggctccaattctgggcagtcaccgcagaaaacgagccctcagctgggctgctgtctggctacccctttcagtgcttgggctttactcctgagcatcaacgggacttcattgcccgggatttggggccaacactggccaacagcacccaccacaatgtaagactcctcattctggatgaccagaggctgctgctccctcattgggccaaggtggtgttgacaaacccagaagctgccaaatatgttcatggcatcgctgtccactggtacctggattttttggcccctgccaagtggactctgggagagacccacagactcttccccaataccacactgtttgcatcagaagcctgcgtggggagccacttctgggagcagtctgttaggctgggttcctgggatcggggcatgcaatattcccatagtataatagagaacctcctctaccacgtggtaggatggacagactggaatctggctttgaacccagaaggaggccccaattgggtgcgcaactttgttgacagccccatcattgtggatatcacaaaggacaccttctacaaacagcctatgttctatcatctggggcactttagcaagttcattccagagggttccactagagtaggcttggttgcctcacagaagaatgatctggatgctgtggcactcctgcatcctgacgggagtgcagtggtggtagtactgaacaggtctagcaaagatgttcccttgagcatcaaagacccagctgtgggctttctggaaaccatttcccctggatactctatccacacctatctctggagaagacag

SEQ ID NO: 1296 - protein, 536 aa, synthetic construct
  REGION 1..536: note = Variant of B-Glucocerebrosidase
MEFSSPSREECPKPLSRVSIMAGSLTGLLLLQAVSWASGARPCIPKSFGYSSVVCVCNATYCDSVDPLTLPALGTFSRYESTRSGRRMELSMGPIQQNRTGTGLLLTLQPEQKFQKVKGFGGAMTDAAALNILALSPPAQNLLLKSYFSEEGIEYNIIRVPMASCDFSIRTYTYDDTPDDFQLHNFSLPEEDTKWKIPLIHRALQLSQRPVSLFASPWTSPTWLKTNGAYNGKGSLKGQPGDIYHQTWARYFVKFLDAYAEHGLQFWAVTAENEPSAGLLSGYPFQCLGFTPEHQRDFIARDLGPTLANSTHHNVRLLILDDQRLLLPHWAKVVLTNPEAAKYVHGIAVHWYLDFLAPAKWTLGETHRLFPNTTLFASEACVGSHFWEQSVRLGSWDRGMQYSHSIIENLLYHVVGWTDWNLALNPEGGPNWVRNFVDSPIIVDITKDTFYKQPMFYHLGHFSKFIPEGSTRVGLVASQKNDLDAVALLHPDGSAVVVVLNRSSKDVPLSIKDPAVGFLETISPGYSIHTYLWRRQ

SEQ ID NO: 1297 - DNA, 1608 bp, synthetic construct
  misc_feature 1..1608: note = Variant of B-Glucocerebrosidase
  source 1..1608: mol_type = other DNA
atggagttttcttctcctagtagagaagaatgccccaagccactgagcagggtgagcatcatggctggatccctcacagggctgcttcttttgcaggcagtctcatgggcctctggagccaggccctgtattcccaagtcattcggctactcctcagtggtgtgtgtatgcaatgccacctattgtgacagtgtcgatcctctcactctccctgctctgggtaccttctcccggtatgagagcacaagaagtggaagacgcatggagctctcaatgggccctatacaggctaaccgcactgggacaggtctgctgctgaccctccaacctgaacagaagtttcagaaagtcaagggatttggaggagccatgactgatgcagcagcactcaacatcttggccctgtctccaccagcccagaacctgctgttgaagtcctacttctcagaggaggggattgagtacaacatcatccgggttcccatggctagctgtgacttctccattaggacctatacatacgctgacacccccgatgattttcagctccataatttcagtctccctgaagaagacaccaaatggaagatacctctgattcacagagccttgcaactgtcccaaaggccagtgagcctcttcgcttctccctggactagtcctacatggctgaagactaatggtgcttacaatgggaagggctccctgaaaggacagccaggtgacatatatcatcagacatgggcccgctactttgtgaaattccttgatgcctatgcagagcacgggctccaattctgggcagtcaccgcagaaaacgagccctcagctgggctgctgtctggctacccctttcagtgcttgggctttactcctgagcatcaacgggacttcattgcccgggatttggggccaacactggccaacagcacccaccacaatgtaagactcctcattctggatgaccagagggtcctgctccctcattgggccaaggtggtgttgacaaacccagaagctgccaaatatgttcatggcatcgctgtccactggtacctggattttttggcccctgccaagtggactctgggagagacccacagactcttccccaataccacactgtttgcatcagaagcctgcgtggggagccagttctgggagcagtctgttaggctgggttcctgggatcggggcatgcaatattcccatagtataatagagaacctcctctaccacgtggtaggatggacagactggaatctggctttgaacccagaaggaggccccaattgggtgcgcaactttgttgacagccccatcattgtggatatcacaaaggacaccttctacaaacagcctatgttctatcatctggggcactttagcaagttcattccagagggttccactagagtaggcttggttgcctcacagaagaatgatctggatgctgtggcactcctgcatcctgacgggagtgcagtggtggtagtactgaacaggtctagcaaagatgttcccttgagcatcaaagacccagctgtgggctttctggaaaccatttcccctggatactctatccacacctatctctggagaagacag

SEQ ID NO: 1298 - protein, 536 aa, synthetic construct
  REGION 1..536: note = Variant of B-Glucocerebrosidase
MEFSSPSREECPKPLSRVSIMAGSLTGLLLLQAVSWASGARPCIPKSFGYSSVVCVCNATYCDSVDPLTLPALGTFSRYESTRSGRRMELSMGPIQANRTGTGLLLTLQPEQKFQKVKGFGGAMTDAAALNILALSPPAQNLLLKSYFSEEGIEYNIIRVPMASCDFSIRTYTYADTPDDFQLHNFSLPEEDTKWKIPLIHRALQLSQRPVSLFASPWTSPTWLKTNGAYNGKGSLKGQPGDIYHQTWARYFVKFLDAYAEHGLQFWAVTAENEPSAGLLSGYPFQCLGFTPEHQRDFIARDLGPTLANSTHHNVRLLILDDQRVLLPHWAKVVLTNPEAAKYVHGIAVHWYLDFLAPAKWTLGETHRLFPNTTLFASEACVGSQFWEQSVRLGSWDRGMQYSHSIIENLLYHVVGWTDWNLALNPEGGPNWVRNFVDSPIIVDITKDTFYKQPMFYHLGHFSKFIPEGSTRVGLVASQKNDLDAVALLHPDGSAVVVVLNRSSKDVPLSIKDPAVGFLETISPGYSIHTYLWRRQ

SEQ ID NO: 1299 - DNA, 1608 bp, synthetic construct
  misc_feature 1..1608: note = Variant of B-Glucocerebrosidase
  source 1..1608: mol_type = other DNA
atggagttttcttctcctagtagagaagaatgccccaagccactgagcagggtgagcatcatggctggatccctcacagggctgcttcttttgcaggcagtctcatgggcctctggagccaggccctgtattcccaagtcattcggctactcctcagtggtgtgtgtatgcaatgccacctattgtgacagtgtcgatcctctcactctccctgctctgggtaccttctcccggtatgagagcacaagaagtggaagacgcatggagctctcaatgggccctatacaggctaaccgcagggggacaggtctgctgctgaccctccaacctgaacagaagtttcagaaagtcaagggatttggaggagccatgactgatgcagcagcactcaacatcttggccctgtctccaccagcccagaacctgctgttgaagtcctacttctcagaggaggggattgagtacaacatcatccgggttcccatggctagctgtgacttctccattaggacctatacatacgatgacacccccgatgattttcagctccataatttcagtctccctgaagaagacaccaaatggaagatacctctgattcacagagccttgcaactgtcccaaaggccagtgagcctcttcgcttctccctggactagtcctacatggctgaagactaatggtgcttacaatgggaagggctccctgaaaggacagccaggtgacatatatcatcagacatgggcccgctactttgtgaaattccttgatgcctatgcagagcacgggctccaattctgggcagtcaccgcagaaaacgagccctcagctgggctgctgtctggctacccctttcagtgcttgggctttactcctgagcatcaacgggacttcattgcccgggatttggggccaacactggccaacagcacccaccacaatgtaagactcctcattctggatgaccagagggtcctgctccctcattgggccaaggtggtgttgacaaacccagaagctgccaaatatgttcatggcatcgctgtccactggtacctggattttttggcccctgccaagtggactctgggagagacccacagactcttccccaataccacactgtttgcatcagaagcctgcgtggggagcaaattctgggagcagtctgttaggctgggttcctgggatcggggcatgcaatattcccatagtataatagagaacctcctctaccacgtggtaggatggacagactggaatctggctttgaacccagaaggaggccccaattgggtgcgcaactttgttgacagccccatcattgtggatatcacaaaggacaccttctacaaacagcctatgttctatcatctggggcactttagcaagttcattccagagggttccactagagtaggcttggttgcctcacagaagaatgatctggatgctgtggcactcctgcatcctgacgggagtgcagtggtggtagtactgaacaggtctagcaaagatgttcccttgactatcaaagacccagctgtgggctttctggaaaccatttcccctggatactctatccacacctatctctggagaagacag

SEQ ID NO: 1300 - protein, 536 aa, synthetic construct
  REGION 1..536: note = Variant of B-Glucocerebrosidase
MEFSSPSREECPKPLSRVSIMAGSLTGLLLLQAVSWASGARPCIPKSFGYSSVVCVCNATYCDSVDPLTLPALGTFSRYESTRSGRRMELSMGPIQANRRGTGLLLTLQPEQKFQKVKGFGGAMTDAAALNILALSPPAQNLLLKSYFSEEGIEYNIIRVPMASCDFSIRTYTYDDTPDDFQLHNFSLPEEDTKWKIPLIHRALQLSQRPVSLFASPWTSPTWLKTNGAYNGKGSLKGQPGDIYHQTWARYFVKFLDAYAEHGLQFWAVTAENEPSAGLLSGYPFQCLGFTPEHQRDFIARDLGPTLANSTHHNVRLLILDDQRVLLPHWAKVVLTNPEAAKYVHGIAVHWYLDFLAPAKWTLGETHRLFPNTTLFASEACVGSKFWEQSVRLGSWDRGMQYSHSIIENLLYHVVGWTDWNLALNPEGGPNWVRNFVDSPIIVDITKDTFYKQPMFYHLGHFSKFIPEGSTRVGLVASQKNDLDAVALLHPDGSAVVVVLNRSSKDVPLTIKDPAVGFLETISPGYSIHTYLWRRQ

SEQ ID NO: 1301 - DNA, 1608 bp, synthetic construct
  misc_feature 1..1608: note = Variant of B-Glucocerebrosidase
  source 1..1608: mol_type = other DNA
atggagttttcttctcctagtagagaagaatgccccaagccactgagcagggtgagcatcatggctggatccctcacagggctgcttcttttgcaggcagtctcatgggcctctggagccaggccctgtattcccaagtcattcggctactcctcagtggtgtgtgtatgcaatgccacctattgtgacagtgtcgatcctctcactctcaccgctctgggtaccttctcccggtatgagagcacaagaagtggaagacgcatggagctctcaatgggccctatacaggctaaccgcactgggacaggtctgctgctgaccctccaacctgaacagaagtttcagaaagtcaagggatttggaggagccatgactgatgcagcagcactcaacatcttggccctgtctccaccagcccagaacctgctgttgaagtcctacttctcagaggaggggattgagtacaacatcatccgggttcccatggctagctgtgacttctccattaggacctatacatacgatgacacccccgatgattttcagctccataatttcagtctccctgaagaagacaccaaatggaagatacctctgattcacagagccttgcaactgtcccaaaggccagtgagcctcttcgcttctccctggactagtcctacatggctgaagactaatggtgcttacaatgggaagggctccctgaaaggacagccaggtgacatatatcatcagacatgggcccgctactttgtgaaattccttgatgcctatgcagagcacgggctccaattctgggcagtcaccgcagaaaacgagccctcagctgggctgctgtctggctacccctttcagtgcttgggctttactcctgagcatcaacgggacttcattgcccgggatttggggccaacactggccaacagcacccaccacaatgtaagactcctcattctggatgaccagagggtcctgctccctcattgggccaaggtggtgttgacaaacccagaagctgccaaatatgttcatggcatcgctgtccactggtacctggattttttggcccctgccgagtggactctgggagagacccacagactcttccccaataccacactgtttgcatcagaagcctgcgtggggagcaacttctgggagcagtctgttaggctgggttcctgggatcggggcatgcaatattcccatagtataatagagaacctcctctaccacgtggtaggatggacagactggaatctggctttgaacccagaaggaggccccaattgggtgcgcaactttgttgacagccccatcattgtggatatcacaaaggacaccttctacaaacagcctatgttctatcatctggggcactttagcaagttcattccagagggttccactagagtaggcttggttgcctcacagaagaatgatctggatgccgtggcactcctgcatcctgacgggagtgcagtggtggtagtactgaacaggtctagcaaagatgttcccttgactatcaaagacccagctgtgggctttctggaaaccatttcccctggatactctatccacacctatctctggagaagacag

SEQ ID NO: 1302 - protein, 536 aa, synthetic construct
  REGION 1..536: note = Variant of B-Glucocerebrosidase
MEFSSPSREECPKPLSRVSIMAGSLTGLLLLQAVSWASGARPCIPKSFGYSSVVCVCNATYCDSVDPLTLTALGTFSRYESTRSGRRMELSMGPIQANRTGTGLLLTLQPEQKFQKVKGFGGAMTDAAALNILALSPPAQNLLLKSYFSEEGIEYNIIRVPMASCDFSIRTYTYDDTPDDFQLHNFSLPEEDTKWKIPLIHRALQLSQRPVSLFASPWTSPTWLKTNGAYNGKGSLKGQPGDIYHQTWARYFVKFLDAYAEHGLQFWAVTAENEPSAGLLSGYPFQCLGFTPEHQRDFIARDLGPTLANSTHHNVRLLILDDQRVLLPHWAKVVLTNPEAAKYVHGIAVHWYLDFLAPAEWTLGETHRLFPNTTLFASEACVGSNFWEQSVRLGSWDRGMQYSHSIIENLLYHVVGWTDWNLALNPEGGPNWVRNFVDSPIIVDITKDTFYKQPMFYHLGHFSKFIPEGSTRVGLVASQKNDLDAVALLHPDGSAVVVVLNRSSKDVPLTIKDPAVGFLETISPGYSIHTYLWRRQ

SEQ ID NO: 1303 - DNA, 1608 bp, synthetic construct
  misc_feature 1..1608: note = Variant of B-Glucocerebrosidase
  source 1..1608: mol_type = other DNA
atggagttttcttctcctagtagagaagaatgccccaagccactgagcagggtgagcatcatggctggatccctcacagggctgcttcttttgcaggcagtctcatgggcctctggagccaggccctgtattcccaagtcattcggctactcctcagtggtgtgtgtatgcaatgccacctattgtgacagtgtcgatcctctcactctccctgctctgggtaccttctcccggtatgagagcacaagaagtggaagacgcatggagctctcaatgggccctatacagcagaaccgcacagggacaggtctgctgctgaccctccaacctgaacagaagtttcagaaagtcaagggatttggaggagccatgactgatgcagcagcactcaacatcttggccctgtctccaccagcccagaacctgctgttgaagtcctacttctcagaggaggggattgagtacaacatcatccgggttcccatggctagctgtgacttctccattaggacctatacatacgatgacacccccgatgattttcagctccataatttcagtctccctgaagaagacaccaaatggaagatacctctgattcacagagccttgcaactgtcccaaaggccagtgagcctcttcgcttctccctggactagtcctacatggctgaagactaatggtgcttacaatgggaagggctccctgaaaggacagccaggtgacatatatcatcagacatgggcccgctactttgtgaaattccttgatgcctatgcagagcacgggctccaattctgggcagtcaccgcagaaaacgagccctcagctgggctgctgtctggctacccctttcagtgcttgggctttactcctgagcatcaacgggacttcattgcccgggatttggggccaacactggccaacagcacccaccacaatgtaagactcctcattctggatgaccagaggctgctgctccctcattgggccaaggtggtgttgacaaacccagaagctgccaaatatgttcatggcatcgctgtccactggtacctggattttttggcccctgccaagtggactctgggagagacccacagactcttccccaataccacactgtttgcatcagaagcctgcgtggggagcaaattctgggagcagtctgttaggctgggttcctgggatcggggcatgcaatattcccatagtataatagagaacctcctctaccacgtggtaggatggacagactggaatctggctttgaacccagaaggaggccccaattgggtgcgcaactttgttgacagccccatcattgtggatatcacaaaggacaccttctacaaacagcctatgttctatcatctggggcactttagcaagttcattccagagggttccactagagtaggcttggttgcctcacagaagaatgatctggatgctgtggcactcctgcatcctgacgggagtgcagtggtggtagtactgaacaggtctagcaaagatgttcccttgagcatcaaagacccagctgtgggctttctggaaaccatttcccctggatactctatccacacctatctctggagaagacag

SEQ ID NO: 1304 - protein, 536 aa, synthetic construct
  REGION 1..536: note = Variant of B-Glucocerebrosidase
MEFSSPSREECPKPLSRVSIMAGSLTGLLLLQAVSWASGARPCIPKSFGYSSVVCVCNATYCDSVDPLTLPALGTFSRYESTRSGRRMELSMGPIQQNRTGTGLLLTLQPEQKFQKVKGFGGAMTDAAALNILALSPPAQNLLLKSYFSEEGIEYNIIRVPMASCDFSIRTYTYDDTPDDFQLHNFSLPEEDTKWKIPLIHRALQLSQRPVSLFASPWTSPTWLKTNGAYNGKGSLKGQPGDIYHQTWARYFVKFLDAYAEHGLQFWAVTAENEPSAGLLSGYPFQCLGFTPEHQRDFIARDLGPTLANSTHHNVRLLILDDQRLLLPHWAKVVLTNPEAAKYVHGIAVHWYLDFLAPAKWTLGETHRLFPNTTLFASEACVGSKFWEQSVRLGSWDRGMQYSHSIIENLLYHVVGWTDWNLALNPEGGPNWVRNFVDSPIIVDITKDTFYKQPMFYHLGHFSKFIPEGSTRVGLVASQKNDLDAVALLHPDGSAVVVVLNRSSKDVPLSIKDPAVGFLETISPGYSIHTYLWRRQ

SEQ ID NO: 1305 - DNA, 1608 bp, synthetic construct
  misc_feature 1..1608: note = Variant of B-Glucocerebrosidase
  source 1..1608: mol_type = other DNA
atggagttttcttctcctagtagagaagaatgccccaagccactgagcagggtgagcatcatggctggatccctcacagggctgcttcttttgcaggcagtctcatgggcctctggagccaggccctgtattcccaagtcattcggctactcctcagtggtgtgtgtatgcaatgccacctattgtgacagtgtcgatcctctcactctcaccgctctgggtaccttctcccggtatgagagcacaagaagtggaagacgcatggagctctcaatgggccctatacagcagaaccgcagggggacaggtctgctgctgaccctccaacctgaacagaagtttcagaaagtcaagggatttggaggagccatgactgatgcagcagcactcaacatcttggccctgtctccaccagcccagaacctgctgttgaagtcctacttctcagaggaggggattgagtacaacatcatccgggttcccatggctagctgtgacttctccattaggacctatacatacgatgacacccccgatgattttcagctccataatttcagtctccctgaagaagacaccaaatggaagatacctctgattcacagagccttgcaactgtcccaaaggccagtgagcctcttcgcttctccctggactagtcctacatggctgaagactaatggtgcttacaatgggaagggctccctgaaaggacagccaggtgacatatatcatcagacatgggcccgctactttgtgaaattccttgatgcctatgcagagcacgggctccaattctgggcagtcaccgcagaaaacgagccctcagctgggctgctgtctggctacccctttcagtgcttgggctttactcctgagcatcaacgggacttcattgcccgggatttggggccaacactggccaacagcacccaccacaatgtaagactcctcattctggatgaccagagggtcctgctccctcattgggccaaggtggtgttgacaaacccagaagctgccaaatatgttcatggcatcgctgtccactggtacctggattttttggcccctgccaagtggactctgggagagacccacagactcttccccaataccacactgtttgcatcagaagcctgcgtggggagccacttctgggagcagtctgttaggctgggttcctgggatcggggcatgcaatattcccatagtataatagagaacctcctctaccacgtggtaggatggacagactggaatctggctttgaacccagaaggaggccccaattgggtgcgcaactttgttgacagccccatcattgtggatatcacaaaggacaccttctacaaacagcctatgttctatcatctggggcactttagcaagttcattccagagggttccactagagtaggcttggttgcctcacagaagaatgatctggatgctgtggcactcctgcatcctgacgggagtgcagtggtggtagtactgaacaggtctagcaaagatgttcccttgactatcaaagacccagctgtgggctttctggaaaccatttcccctggatactctatccacacctatctctggagaagacag

SEQ ID NO: 1306 - protein, 536 aa, synthetic construct
  REGION 1..536: note = Variant of B-Glucocerebrosidase
MEFSSPSREECPKPLSRVSIMAGSLTGLLLLQAVSWASGARPCIPKSFGYSSVVCVCNATYCDSVDPLTLTALGTFSRYESTRSGRRMELSMGPIQQNRRGTGLLLTLQPEQKFQKVKGFGGAMTDAAALNILALSPPAQNLLLKSYFSEEGIEYNIIRVPMASCDFSIRTYTYDDTPDDFQLHNFSLPEEDTKWKIPLIHRALQLSQRPVSLFASPWTSPTWLKTNGAYNGKGSLKGQPGDIYHQTWARYFVKFLDAYAEHGLQFWAVTAENEPSAGLLSGYPFQCLGFTPEHQRDFIARDLGPTLANSTHHNVRLLILDDQRVLLPHWAKVVLTNPEAAKYVHGIAVHWYLDFLAPAKWTLGETHRLFPNTTLFASEACVGSHFWEQSVRLGSWDRGMQYSHSIIENLLYHVVGWTDWNLALNPEGGPNWVRNFVDSPIIVDITKDTFYKQPMFYHLGHFSKFIPEGSTRVGLVASQKNDLDAVALLHPDGSAVVVVLNRSSKDVPLTIKDPAVGFLETISPGYSIHTYLWRRQ

SEQ ID NO: 1307 - DNA, 1608 bp, synthetic construct
  misc_feature 1..1608: note = Variant of B-Glucocerebrosidase
  source 1..1608: mol_type = other DNA
atggagttttcttctcctagtagagaagaatgccccaagccactgagcagggtgagcatcatggctggatccctcacagggctgcttcttttgcaggcagtctcatgggcctctggagccaggccctgtattcccaagtcattcggctactcctcagtggtgtgtgtatgcaatgccacctattgtgacagtgtcgatcctctcactctcaccgctctgggtaccttctcccggtatgagagcacaagaagtggaagacgcatggagctctcaatgggccctatacaggctaaccgcactgggacaggtctgctgctgaccctccaacctgaacagaagtttcagaaagtcaagggatttggaggagccatgactgatgcagcagcactcaacatcttggccctgtctccaccagcccagaacctgctgttgaagtcctacttctcagaggaggggattgagtacaacatcatccgggttcccatggctagctgtgacttctccattaggacctatacatacgatgacacccccgatgattttcagctccataatttcagtctccctgaagaagacaccaaatggaagatacctctgattcacagagccttgcaactgtcccaaaggccagtgagcctcttcgcttctccctggactagtcctacatggctgaagactaatggtgcttacaatgggaagggctccctgaaaggacagccaggtgacatatatcatcagacatgggcccgctactttgtgaaattccttgatgcctatgcagagcacgggctccaattctgggcagtcaccgcagaaaacgagccctcagctgggctgctgtctggctacccctttcagtgcttgggctttactcctgagcatcaacgggacttcattgcccgggatttggggccaacactggccaacagcacccaccacaatgtaagactcctcattctggatgaccagaggctgctgctccctcattgggccaaggtggtgttgacaaacccagaagctgccaaatatgttcatggcatcgctgtccactggtacctggattttttggcccctgccaagtggactctgggagagacccacagactcttccccaataccacactgtttgcatcagaagcctgcgtggggagcaaattctgggagcagtctgttaggctgggttcctgggatcggggcatgcaatattcccatagtataatagagaacctcctctaccacgtggtaggatggacagactggaatctggctttgaacccagaaggaggccccaattgggtgcgcaactttgttgacagccccatcattgtggatatcacaaaggacaccttctacaaacagcctatgttctatcatctggggcactttagcaagttcattccagagggttccactagagtaggcttggttgcctcacagaagaatgatctggatgctgtggcactcctgcatcctgacgggagtgcagtggtggtagtactgaacaggtctagcaaagatgttcccttgagcatcaaagacccagctgtgggctttctggaaaccatttcccctggatactctatccacacctatctctggagaagacag

SEQ ID NO: 1308 - protein, 536 aa, synthetic construct
  REGION 1..536: note = Variant of B-Glucocerebrosidase
MEFSSPSREECPKPLSRVSIMAGSLTGLLLLQAVSWASGARPCIPKSFGYSSVVCVCNATYCDSVDPLTLTALGTFSRYESTRSGRRMELSMGPIQANRTGTGLLLTLQPEQKFQKVKGFGGAMTDAAALNILALSPPAQNLLLKSYFSEEGIEYNIIRVPMASCDFSIRTYTYDDTPDDFQLHNFSLPEEDTKWKIPLIHRALQLSQRPVSLFASPWTSPTWLKTNGAYNGKGSLKGQPGDIYHQTWARYFVKFLDAYAEHGLQFWAVTAENEPSAGLLSGYPFQCLGFTPEHQRDFIARDLGPTLANSTHHNVRLLILDDQRLLLPHWAKVVLTNPEAAKYVHGIAVHWYLDFLAPAKWTLGETHRLFPNTTLFASEACVGSKFWEQSVRLGSWDRGMQYSHSIIENLLYHVVGWTDWNLALNPEGGPNWVRNFVDSPIIVDITKDTFYKQPMFYHLGHFSKFIPEGSTRVGLVASQKNDLDAVALLHPDGSAVVVVLNRSSKDVPLSIKDPAVGFLETISPGYSIHTYLWRRQ

SEQ ID NO: 1309 - DNA, 1608 bp, synthetic construct
  misc_feature 1..1608: note = Variant of B-Glucocerebrosidase
  source 1..1608: mol_type = other DNA
atggagttttcttctcctagtagagaagaatgccccaagccactgagcagggtgagcatcatggctggatccctcacagggctgcttcttttgcaggcagtctcatgggcctctggagccaggccctgtattcccaagtcattcggctactcctcagtggtgtgtgtatgcaatgccacctattgtgacagtgtcgatcctctcactctcaccgctctgggtaccttctcccggtatgagagcacaagaagtggaagacgcatggagctctcaatgggccctatacagcagaaccgcacagggacaggtctgctgctgaccctccaacctgaacagaagtttcagaaagtcaagggatttggaggagccatgactgatgcagcagcactcaacatcttggccctgtctccaccagcccagaacctgctgttgaagtcctacttctcagaggaggggattgagtacaacatcatccgggttcccatggctagctgtgacttctccattaggacctatacatacgctgacacccccgatgattttcagctccataatttcagtctccctgaagaagacaccaaatggaagatacctctgattcacagagccttgcaactgtcccaaaggccagtgagcctcttcgcttctccctggactagtcctacatggctgaagactaatggtgcttacaatgggaagggctccctgaaaggacagccaggtgacatatatcatcagacatgggcccgctactttgtgaaattccttgatgcctatgcagagcacgggctccaattctgggcagtcaccgcagaaaacgagccctcagctgggctgctgtctggctacccctttcagtgcttgggctttactcctgagcatcaacgggacttcattgcccgggatttggggccaacactggccaacagcacccaccacaatgtaagactcctcattctggatgaccagagggtcctgctccctcattgggccaaggtggtgttgacaaacccagaagctgccaaatatgttcatggcatcgctgtccactggtacctggattttttggcccctgccaagtggactctgggagagacccacagactcttccccaataccacactgtttgcatcagaagcctgcgtggggagcaaattctgggagcagtctgttaggctgggttcctgggatcggggcatgcaatattcccatagtataatagagaacctcctctaccacgtggtaggatggacagactggaatctggctttgaacccagaaggaggccccaattgggtgcgcaactttgttgacagccccatcattgtggatatcacaaaggacaccttctacaaacagcctatgttctatcatctggggcactttagcaagttcattccagagggttccactagagtaggcttggttgcctcacagaagaatgatctggatgctgtggcactcctgcatcctgacgggagtgcagtggtggtagtactgaaccagtctagcaaagatgttcccttgactatcaaagacccagctgtgggctttctggaaaccatttcccctggatactctatccacacctatctctggagaagacag

SEQ ID NO: 1310 - protein, 536 aa, synthetic construct
  REGION 1..536: note = Variant of B-Glucocerebrosidase
MEFSSPSREECPKPLSRVSIMAGSLTGLLLLQAVSWASGARPCIPKSFGYSSVVCVCNATYCDSVDPLTLTALGTFSRYESTRSGRRMELSMGPIQQNRTGTGLLLTLQPEQKFQKVKGFGGAMTDAAALNILALSPPAQNLLLKSYFSEEGIEYNIIRVPMASCDFSIRTYTYADTPDDFQLHNFSLPEEDTKWKIPLIHRALQLSQRPVSLFASPWTSPTWLKTNGAYNGKGSLKGQPGDIYHQTWARYFVKFLDAYAEHGLQFWAVTAENEPSAGLLSGYPFQCLGFTPEHQRDFIARDLGPTLANSTHHNVRLLILDDQRVLLPHWAKVVLTNPEAAKYVHGIAVHWYLDFLAPAKWTLGETHRLFPNTTLFASEACVGSKFWEQSVRLGSWDRGMQYSHSIIENLLYHVVGWTDWNLALNPEGGPNWVRNFVDSPIIVDITKDTFYKQPMFYHLGHFSKFIPEGSTRVGLVASQKNDLDAVALLHPDGSAVVVVLNQSSKDVPLTIKDPAVGFLETISPGYSIHTYLWRRQ

SEQ ID NO: 1311 - DNA, 1608 bp, synthetic construct
  misc_feature 1..1608: note = Variant of B-Glucocerebrosidase
  source 1..1608: mol_type = other DNA
atggagttttcttctcctagtagagaagaatgccccaagccactgagcagggtgagcatcatggctggatccctcacagggctgcttcttttgcaggcagtctcatgggcctctggagccaggccctgtattcccaagtcattcggctactcctcagtggtgtgtgtatgcaatgccacctattgtgacagtgtcgatcctctcactctcaccgctctgggtaccttctcccggtatgagagcacaagaagtggaagacgcatggagctctcaatgggccctatacaggctaaccgcagggggacaggtctgctgctgaccctccaacctgaacagaagtttcagaaagtcaagggatttggaggagccatgactgatgcagcagcactcaacatcttggccctgtctccaccagcccagaacctgctgttgaagtcctacttctcagaggaggggattgagtacaacatcatccgggttcccatggctagctgtgacttctccattaggacctatacatacgctgacacccccgatgattttcagctccataatttcagtctccctgaagaagacaccaaatggaagatacctctgattcacagagccttgcaactgtcccaaaggccagtgagcctcttcgcttctccctggactagtcctacatggctgaagactaatggtgcttacaatgggaagggctccctgaaaggacagccaggtgacatatatcatcagacatgggcccgctactttgtgaaattccttgatgcctatgcagagcacgggctccaattctgggcagtcaccgcagaaaacgagccctcagctgggctgctgtctggctacccctttcagtgcttgggctttactcctgagcatcaacgggacttcattgcccgggatttggggccaacactggccaacagcacccaccacaatgtaagactcctcattctggatgaccagagggtcctgctccctcattgggccaaggtggtgttgacaaacccagaagctgccaaatatgttcatggcatcgctgtccactggtacctggattttttggcccctgccaagtggactctgggagagacccacagactcttccccaataccacactgtttgcatcagaagcctgcgtggggagccagttctgggagcagtctgttaggctgggttcctgggatcggggcatgcaatattcccatagtataatagagaacctcctctaccacgtggtaggatggacagactggaatctggctttgaacccagaaggaggccccaattgggtgcgcaactttgttgacagccccatcattgtggatatcacaaaggacaccttctacaaacagcctatgttctatcatctggggcactttagcaagttcattccagagggttccactagagtaggcttggttgcctcacagaagaatgatctggatgctgtggcactcctgcatcctgacgggagtgcagtggtggtagtactgaacaggtctagcaaagatgttcccttgactatcaaagacccagctgtgggctttctggaaaccatttcccctggatactctatccacacctatctctggagaagacag

SEQ ID NO: 1312 - protein, 536 aa, synthetic construct
  REGION 1..536: note = Variant of B-Glucocerebrosidase
MEFSSPSREECPKPLSRVSIMAGSLTGLLLLQAVSWASGARPCIPKSFGYSSVVCVCNATYCDSVDPLTLTALGTFSRYESTRSGRRMELSMGPIQANRRGTGLLLTLQPEQKFQKVKGFGGAMTDAAALNILALSPPAQNLLLKSYFSEEGIEYNIIRVPMASCDFSIRTYTYADTPDDFQLHNFSLPEEDTKWKIPLIHRALQLSQRPVSLFASPWTSPTWLKTNGAYNGKGSLKGQPGDIYHQTWARYFVKFLDAYAEHGLQFWAVTAENEPSAGLLSGYPFQCLGFTPEHQRDFIARDLGPTLANSTHHNVRLLILDDQRVLLPHWAKVVLTNPEAAKYVHGIAVHWYLDFLAPAKWTLGETHRLFPNTTLFASEACVGSQFWEQSVRLGSWDRGMQYSHSIIENLLYHVVGWTDWNLALNPEGGPNWVRNFVDSPIIVDITKDTFYKQPMFYHLGHFSKFIPEGSTRVGLVASQKNDLDAVALLHPDGSAVVVVLNRSSKDVPLTIKDPAVGFLETISPGYSIHTYLWRRQ

SEQ ID NO: 1313 - DNA, 1608 bp, synthetic construct
  misc_feature 1..1608: note = Variant of B-Glucocerebrosidase
  source 1..1608: mol_type = other DNA
atggagttttcttctcctagtagagaagaatgccccaagccactgagcagggtgagcatcatggctggatccctcacagggctgcttcttttgcaggcagtctcatgggcctctggagccaggccctgtattcccaagtcattcggctactcctcagtggtgtgtgtatgcaatgccacctattgtgacagtgtcgatcctctcactctccctgctctgggtaccttctcccggtatgagagcacaagaagtggaagacgcatggagctctcaatgggccctatacaggctaaccgcactgggacaggtctgctgctgaccctccaacctgaacagaagtttcagaaagtcaagggatttggaggagccatgactgatgcagcagcactcaacatcttggccctgtctccaccagcccagaacctgctgttgaagtcctacttctcagaggaggggattgagtacaacatcatccgggttcccatggctagctgtgacttctccattaggacctatacatacgctgacacccccgatgattttcagctccataatttcagtctccctgaagaagacaccaaatggaagatacctctgattcaccaggccttgcaactgtcccaaaggccagtgagcctcttcgcttctccctggactagtcctacatggctgaagactaatggtgcttacaatgggaagggctccctgaaaggacagccaggtgacatatatcatcagacatgggcccgctactttgtgaaattccttgatgcctatgcagagcacgggctccaattctgggcagtcaccgcagaaaacgagccctcagctgggctgctgtctggctacccctttcagtgcttgggctttactcctgagcatcaacgggacttcattgcccgggatttggggccaacactggccaacagcacccaccacaatgtaagactcctcattctggatgaccagaggctgctgctccctcattgggccaaggtggtgttgacaaacccagaagctgccaaatatgttcatggcatcgctgtccactggtacctggattttttggcccctgccaagtggactctgggagagacccacagactcttccccaataccacactgtttgcatcagaagcctgcgtggggagcaacttctgggagcagtctgttaggctgggttcctgggatcggggcatgcaatattcccatagtataatagagaacctcctctaccacgtggtaggatggacagactggaatctggctttgaacccagaaggaggccccaattgggtgcgcaactttgttgacagccccatcattgtggatatcacaaaggacaccttctacaaacagcctatgttctatcatctggggcactttagcaagttcattccagagggttccactagagtaggcttggttgcctcacagaagaatgatctggatgccgtggcactcgaacatcctgacgggagtgcagtggtggtagtactgaacaggtctagcaaagatgttcccttgactatcaaagacccagctgtgggctttctggaaaccatttcccctggatactctatccacacctatctctggagaagacag

SEQ ID NO: 1314 - protein, 536 aa, synthetic construct
  REGION 1..536: note = Variant of B-Glucocerebrosidase
MEFSSPSREECPKPLSRVSIMAGSLTGLLLLQAVSWASGARPCIPKSFGYSSVVCVCNATYCDSVDPLTLPALGTFSRYESTRSGRRMELSMGPIQANRTGTGLLLTLQPEQKFQKVKGFGGAMTDAAALNILALSPPAQNLLLKSYFSEEGIEYNIIRVPMASCDFSIRTYTYADTPDDFQLHNFSLPEEDTKWKIPLIHQALQLSQRPVSLFASPWTSPTWLKTNGAYNGKGSLKGQPGDIYHQTWARYFVKFLDAYAEHGLQFWAVTAENEPSAGLLSGYPFQCLGFTPEHQRDFIARDLGPTLANSTHHNVRLLILDDQRLLLPHWAKVVLTNPEAAKYVHGIAVHWYLDFLAPAKWTLGETHRLFPNTTLFASEACVGSNFWEQSVRLGSWDRGMQYSHSIIENLLYHVVGWTDWNLALNPEGGPNWVRNFVDSPIIVDITKDTFYKQPMFYHLGHFSKFIPEGSTRVGLVASQKNDLDAVALEHPDGSAVVVVLNRSSKDVPLTIKDPAVGFLETISPGYSIHTYLWRRQ

SEQ ID NO: 1315 - DNA, 1608 bp, synthetic construct
  misc_feature 1..1608: note = Variant of B-Glucocerebrosidase
  source 1..1608: mol_type = other DNA
atggagttttcttctcctagtagagaagaatgccccaagccactgagcagggtgagcatcatggctggatccctcacagggctgcttcttttgcaggcagtctcatgggcctctggagccaggccctgtattcccaagtcattcggctactcctcagtggtgtgtgtatgcaatgccacctattgtgacagtgtcgatcctctcactctccctgctctgggtaccttctcccggtatgagagcacaagaagtggaagacgcatggagctctcaatgggccctatacaggctaaccgcactgggacaggtctgctgctgaccctccaacctgaacagaagtttcagaaagtcaagggatttggaggagccatgactgatgcagcagcactcaacatcttggccctgtctccaccagcccagaacctgctgttgaagtcctacttctcagaggaggggattgagtacaacatcatccgggttcccatggctagctgtgacttctccattaggacctatacatacgctgacacccccgatgattttcagctccataatttcagtctccctgaagaagacaccaaatggaagatacctctgattcacagagccttgcaactgtcccaaaggccagtgagcctcttcgcttctccctggactagtcctacatggctgaagactaatggtgcttacaatgggaagggctccctgaaaggacagccaggtgacatatatcatcagacatgggcccgctactttgtgaaattccttgatgcctatgcagagcacgggctccaattctgggcagtcaccgcagaaaacgagccctcagctgggctgctgtctggctacccctttcagtgcttgggctttactcctgagcatcaacgggacttcattgcccgggatttggggccaacactggccaacagcacccaccacaatgtaagactcctcattctggatgaccagagggtcctgctccctcattgggccaaggtggtgttgacaaacccagaagctgccaaatatgttcatggcatcgctgtccactggtacctggattttttggcccctgccaagtggactctgggagagacccacagactcttccccaataccacactgtttgcatcagaagcctgcgtggggagcaacttctgggagcagtctgttaggctgggttcctgggatcggggcatgcaatattcccatagtataatagagaacctcctctaccacgtggtaggatggacagactggaatctggctttgaacccagaaggaggccccaattgggtgcgcaactttgttgacagccccatcattgtggatatcacaaaggacaccttctacaaacagcctatgttctatcatctggggcactttagcaagttcattccagagggttccactagagtaggcttggttgcctcacagaagaatgatctggatgctgtggcactcctgcatcctgacgggagtgcagtggtggtagtactgaaccagtctagcaaagatgttcccttgactatcaaagacccagctgtgggctttctggaaaccatttcccctggatactctatccacacctatctctggagaagacag

SEQ ID NO: 1316 - protein, 536 aa, synthetic construct
  REGION 1..536: note = Variant of B-Glucocerebrosidase
MEFSSPSREECPKPLSRVSIMAGSLTGLLLLQAVSWASGARPCIPKSFGYSSVVCVCNATYCDSVDPLTLPALGTFSRYESTRSGRRMELSMGPIQANRTGTGLLLTLQPEQKFQKVKGFGGAMTDAAALNILALSPPAQNLLLKSYFSEEGIEYNIIRVPMASCDFSIRTYTYADTPDDFQLHNFSLPEEDTKWKIPLIHRALQLSQRPVSLFASPWTSPTWLKTNGAYNGKGSLKGQPGDIYHQTWARYFVKFLDAYAEHGLQFWAVTAENEPSAGLLSGYPFQCLGFTPEHQRDFIARDLGPTLANSTHHNVRLLILDDQRVLLPHWAKVVLTNPEAAKYVHGIAVHWYLDFLAPAKWTLGETHRLFPNTTLFASEACVGSNFWEQSVRLGSWDRGMQYSHSIIENLLYHVVGWTDWNLALNPEGGPNWVRNFVDSPIIVDITKDTFYKQPMFYHLGHFSKFIPEGSTRVGLVASQKNDLDAVALLHPDGSAVVVVLNQSSKDVPLTIKDPAVGFLETISPGYSIHTYLWRRQ

SEQ ID NO: 1317 - DNA, 1608 bp, synthetic construct
  misc_feature 1..1608: note = Variant of B-Glucocerebrosidase
  source 1..1608: mol_type = other DNA
atggagttttcttctcctagtagagaagaatgccccaagccactgagcagggtgagcatcatggctggatccctcacagggctgcttcttttgcaggcagtctcatgggcctctggagccaggccctgtattcccaagtcattcggctactcctcagtggtgtgtgtatgcaatgccacctattgtgacagtgtcgatcctctcactctccctgctctgggtaccttctcccggtatgagagcacaagaagtggaagacgcatggagctctcaatgggccctatacaggctaaccgcacagggacaggtctgctgctgaccctccaacctgaacagaagtttcagaaagtcaagggatttggaggagccatgactgatgcagcagcactcaacatcttggccctgtctccaccagcccagaacctgctgttgaagtcctacttctcagaggaggggattgagtacaacatcatccgggttcccatggctagctgtgacttctccattaggacctatacatacgctgacacccccgatgattttcagctccataatttcagtctccctgaagaagacaccaaatggaagatacctctgattcacagagccttgcaactgtcccaaaggccagtgagcctcttcgcttctccctggactagtcctacatggctgaagactaatggtgcttacaatgggaagggctccctgaaaggacagccaggtgacatatatcatcagacatgggcccgctactttgtgaaattccttgatgcctatgcagagcacgggctccaattctgggcagtcaccgcagaaaacgagccctcagctgggctgctgtctggctacccctttcagtgcttgggctttactcctgagcatcaacgggacttcattgcccgggatttggggccaacactggccaacagcacccaccacaatgtaagactcctcattctggatgaccagagggtcctgctccctcattgggccaaggtggtgttgacaaacccagaagctgccaaatatgttcatggcatcgctgtccactggtacctggattttttggcccctgccaagtggactctgggagagacccacagactcttccccaataccacactgtttgcatcagaagcctgcgtggggagccacttctgggagcagtctgttaggctgggttcctgggatcggggcatgcaatattcccatagtataatagagaacctcctctaccacgtggtaggatggacagactggaatctggctttgaacccagaaggaggccccaattgggtgcgcaactttgttgacagccccatcattgtggatatcacaaaggacaccttctacaaacagcctatgttctatcatctggggcactttagcaagttcattccagagggttccactagagtaggcttggttgcctcacagaagaatgatctggatgctgtggcactcctgcatcctgacgggagtgcagtggtggtagtactgaaccagtctagcaaagatgttcccttgactatcaaagacccagctgtgggctttctggaaaccatttcccctggatactctatccacacctatctctggagaagacag

SEQ ID NO: 1318 - protein, 536 aa, synthetic construct
  REGION 1..536: note = Variant of B-Glucocerebrosidase
MEFSSPSREECPKPLSRVSIMAGSLTGLLLLQAVSWASGARPCIPKSFGYSSVVCVCNATYCDSVDPLTLPALGTFSRYESTRSGRRMELSMGPIQANRTGTGLLLTLQPEQKFQKVKGFGGAMTDAAALNILALSPPAQNLLLKSYFSEEGIEYNIIRVPMASCDFSIRTYTYADTPDDFQLHNFSLPEEDTKWKIPLIHRALQLSQRPVSLFASPWTSPTWLKTNGAYNGKGSLKGQPGDIYHQTWARYFVKFLDAYAEHGLQFWAVTAENEPSAGLLSGYPFQCLGFTPEHQRDFIARDLGPTLANSTHHNVRLLILDDQRVLLPHWAKVVLTNPEAAKYVHGIAVHWYLDFLAPAKWTLGETHRLFPNTTLFASEACVGSHFWEQSVRLGSWDRGMQYSHSIIENLLYHVVGWTDWNLALNPEGGPNWVRNFVDSPIIVDITKDTFYKQPMFYHLGHFSKFIPEGSTRVGLVASQKNDLDAVALLHPDGSAVVVVLNQSSKDVPLTIKDPAVGFLETISPGYSIHTYLWRRQ

SEQ ID NO: 1319 - DNA, 1608 bp, synthetic construct
  misc_feature 1..1608: note = Variant of B-Glucocerebrosidase
  source 1..1608: mol_type = other DNA
atggagttttcttctcctagtagagaagaatgccccaagccactgagcagggtgagcatcatggctggatccctcacagggctgcttcttttgcaggcagtctcatgggcctctggagccaggccctgtattcccaagtcattcggctactcctcagtggtgtgtgtatgcaatgccacctattgtgacagtgtcgatcctctcactctcaccgctctgggtaccttctcccggtatgagagcacaagaagtggaagacgcatggagctctcaatgggccctatacaggctaaccgcagggggacaggtctgctgctgaccctccaacctgaacagaagtttcagaaagtcaagggatttggaggagccatgactgatgcagcagcactcaacatcttggccctgtctccaccagcccagaacctgctgttgaagtcctacttctcagaggaggggattgagtacaacatcatccgggttcccatggctagctgtgacttctccattaggacctatacatacgctgacacccccgatgattttcagctccataatttcagtctccctgaagaagacaccaaatggaagatacctctgattcacagagccttgcaactgtcccaaaggccagtgagcctcttcgcttctccctggactagtcctacatggctgaagactaatggtgcttacaatgggaagggctccctgaaaggacagccaggtgacatatatcatcagacatgggcccgctactttgtgaaattccttgatgcctatgcagagcacgggctccaattctgggcagtcaccgcagaaaacgagccctcagctgggctgctgtctggctacccctttcagtgcttgggctttactcctgagcatcaacgggacttcattgcccgggatttggggccaacactggccaacagcacccaccacaatgtaagactcctcattctggatgaccagagggtcctgctccctcattgggccaaggtggtgttgacaaacccagaagctgccaaatatgttcatggcatcgctgtccactggtacctggattttttggcccctgccaagtggactctgggagagacccacagactcttccccaataccacactgtttgcatcagaagcctgcgtggggagccacttctgggagcagtctgttaggctgggttcctgggatcggggcatgcaatattcccatagtataatagagaacctcctctaccacgtggtaggatggacagactggaatctggctttgaacccagaaggaggccccaattgggtgcgcaactttgttgacagccccatcattgtggatatcacaaaggacaccttctacaaacagcctatgttctatcatctggggcactttagcaagttcattccagagggttccactagagtaggcttggttgcctcacagaagaatgatctggatgctgtggcactcctgcatcctgacgggagtgcagtggtggtagtactgaacaggtctagcaaagatgttcccttgagcatcaaagacccagctgtgggctttctggaaaccatttcccctggatactctatccacacctatctctggagaagacag

SEQ ID NO: 1320 - protein, 536 aa, synthetic construct
  REGION 1..536: note = Variant of B-Glucocerebrosidase
MEFSSPSREECPKPLSRVSIMAGSLTGLLLLQAVSWASGARPCIPKSFGYSSVVCVCNATYCDSVDPLTLTALGTFSRYESTRSGRRMELSMGPIQANRRGTGLLLTLQPEQKFQKVKGFGGAMTDAAALNILALSPPAQNLLLKSYFSEEGIEYNIIRVPMASCDFSIRTYTYADTPDDFQLHNFSLPEEDTKWKIPLIHRALQLSQRPVSLFASPWTSPTWLKTNGAYNGKGSLKGQPGDIYHQTWARYFVKFLDAYAEHGLQFWAVTAENEPSAGLLSGYPFQCLGFTPEHQRDFIARDLGPTLANSTHHNVRLLILDDQRVLLPHWAKVVLTNPEAAKYVHGIAVHWYLDFLAPAKWTLGETHRLFPNTTLFASEACVGSHFWEQSVRLGSWDRGMQYSHSIIENLLYHVVGWTDWNLALNPEGGPNWVRNFVDSPIIVDITKDTFYKQPMFYHLGHFSKFIPEGSTRVGLVASQKNDLDAVALLHPDGSAVVVVLNRSSKDVPLSIKDPAVGFLETISPGYSIHTYLWRRQ

SEQ ID NO: 1321 - DNA, 1608 bp, synthetic construct
  misc_feature 1..1608: note = Variant of B-Glucocerebrosidase
  source 1..1608: mol_type = other DNA
atggagttttcttctcctagtagagaagaatgccccaagccactgagcagggtgagcatcatggctggatccctcacagggctgcttcttttgcaggcagtctcatgggcctctggagccaggccctgtattcccaagtcattcggctactcctcagtggtgtgtgtatgcaatgccacctattgtgacagtgtcgatcctctcactctcaccgctctgggtaccttctcccggtatgagagcacaagaagtggaagacgcatggagctctcaatgggccctatacaggctaaccgcagggggacaggtctgctgctgaccctccaacctgaacagaagtttcagaaagtcaagggatttggaggagccatgactgatgcagcagcactcaacatcttggccctgtctccaccagcccagaacctgctgttgaagtcctacttctcagaggaggggattgagtacaacatcatccgggttcccatggctagctgtgacttctccattaggacctatacatacgatgacacccccgatgattttcagctccataatttcagtctccctgaagaagacaccaaatggaagatacctctgattcacagagccttgcaactgtcccaaaggccagtgagcctcttcgcttctccctggactagtcctacatggctgaagactaatggtgcttacaatgggaagggctccctgaaaggacagccaggtgacatatatcatcagacatgggcccgctactttgtgaaattccttgatgcctatgcagagcacgggctccaattctgggcagtcaccgcagaaaacgagccctcagctgggctgctgtctggctacccctttcagtgcttgggctttactcctgagcatcaacgggacttcattgcccgggatttggggccaacactggccaacagcacccaccacaatgtaagactcctcattctggatgaccagagggtcctgctccctcattgggccaaggtggtgttgacaaacccagaagctgccaaatatgttcatggcatcgctgtccactggtacctggattttttggcccctgccaagtggactctgggagagacccacagactcttccccaataccacactgtttgcatcagaagcctgcgtggggagcaacttctgggagcagtctgttaggctgggttcctgggatcggggcatgcaatattcccatagtataatagagaacctcctctaccacgtggtaggatggacagactggaatctggctttgaacccagaaggaggccccaattgggtgcgcaactttgttgacagccccatcattgtggatatcacaaaggacaccttctacaaacagcctatgttctatcatctggggcactttagcaagttcattccagagggttccactagagtaggcttggttgcctcacagaagaatgatctggatgctgtggcactcctgcatcctgacgggagtgcagtggtggtagtactgaacaggtctagcaaagatgttcccttgactatcaaagacccagctgtgggctttctggaaaccatttcccctggatactctatccacacctatctctggagaagacag

SEQ ID NO: 1322 - protein, 536 aa, synthetic construct
  REGION 1..536: note = Variant of B-Glucocerebrosidase
MEFSSPSREECPKPLSRVSIMAGSLTGLLLLQAVSWASGARPCIPKSFGYSSVVCVCNATYCDSVDPLTLTALGTFSRYESTRSGRRMELSMGPIQANRRGTGLLLTLQPEQKFQKVKGFGGAMTDAAALNILALSPPAQNLLLKSYFSEEGIEYNIIRVPMASCDFSIRTYTYDDTPDDFQLHNFSLPEEDTKWKIPLIHRALQLSQRPVSLFASPWTSPTWLKTNGAYNGKGSLKGQPGDIYHQTWARYFVKFLDAYAEHGLQFWAVTAENEPSAGLLSGYPFQCLGFTPEHQRDFIARDLGPTLANSTHHNVRLLILDDQRVLLPHWAKVVLTNPEAAKYVHGIAVHWYLDFLAPAKWTLGETHRLFPNTTLFASEACVGSNFWEQSVRLGSWDRGMQYSHSIIENLLYHVVGWTDWNLALNPEGGPNWVRNFVDSPIIVDITKDTFYKQPMFYHLGHFSKFIPEGSTRVGLVASQKNDLDAVALLHPDGSAVVVVLNRSSKDVPLTIKDPAVGFLETISPGYSIHTYLWRRQ

SEQ ID NO: 1323 - DNA, 1608 bp, synthetic construct
  misc_feature 1..1608: note = Variant of B-Glucocerebrosidase
  source 1..1608: mol_type = other DNA
atggagttttcttctcctagtagagaagaatgccccaagccactgagcagggtgagcatcatggctggatccctcacagggctgcttcttttgcaggcagtctcatgggcctctggagccaggccctgtattcccaagtcattcggctactcctcagtggtgtgtgtatgcaatgccacctattgtgacagtgtcgatcctctcactctcaccgctctgggtaccttctcccggtatgagagcacaagaagtggaagacgcatggagctctcaatgggccctatacaggctaaccgcagggggacaggtctgctgctgaccctccaacctgaacagaagtttcagaaagtcaagggatttggaggagccatgactgatgcagcagcactcaacatcttggccctgtctccaccagcccagaacctgctgttgaagtcctacttctcagaggaggggattgagtacaacatcatccgggttcccatggctagctgtgacttctccattaggacctatacatacgatgacacccccgatgattttcagctccataatttcagtctccctgaagaagacaccaaatggaagatacctctgattcacagagccttgcaactgtcccaaaggccagtgagcctcttcgcttctccctggactagtcctacatggctgaagactaatggtgcttacaatgggaagggctccctgaaaggacagccaggtgacatatatcatcagacatgggcccgctactttgtgaaattccttgatgcctatgcagagcacgggctccaattctgggcagtcaccgcagaaaacgagccctcagctgggctgctgtctggctacccctttcagtgcttgggctttactcctgagcatcaacgggacttcattgcccgggatttggggccaacactggccaacagcacccaccacaatgtaagactcctcattctggatgaccagagggtcctgctccctcattgggccaaggtggtgttgacaaacccagaagctgccaaatatgttcatggcatcgctgtccactggtacctggattttttggcccctgccaagtggactctgggagagacccacagactcttccccaataccacactgtttgcatcagaagcctgcgtggggagccacttctgggagcagtctgttaggctgggttcctgggatcggggcatgcaatattcccatagtataatagagaacctcctctaccacgtggtaggatggacagactggaatctggctttgaacccagaaggaggccccaattgggtgcgcaactttgttgacagccccatcattgtggatatcacaaaggacaccttctacaaacagcctatgttctatcatctggggcactttagcaagttcattccagagggttccactagagtaggcttggttgcctcacagaagaatgatctggatgctgtggcactcctgcatcctgacgggagtgcagtggtggtagtactgaacaggtctagcaaagatgttcccttgactatcaaagacccagctgtgggctttctggaaaccatttcccctggatactctatccacacctatctctggagaagacag

SEQ ID NO: 1324 - protein, 536 aa, synthetic construct
  REGION 1..536: note = Variant of B-Glucocerebrosidase
MEFSSPSREECPKPLSRVSIMAGSLTGLLLLQAVSWASGARPCIPKSFGYSSVVCVCNATYCDSVDPLTLTALGTFSRYESTRSGRRMELSMGPIQANRRGTGLLLTLQPEQKFQKVKGFGGAMTDAAALNILALSPPAQNLLLKSYFSEEGIEYNIIRVPMASCDFSIRTYTYDDTPDDFQLHNFSLPEEDTKWKIPLIHRALQLSQRPVSLFASPWTSPTWLKTNGAYNGKGSLKGQPGDIYHQTWARYFVKFLDAYAEHGLQFWAVTAENEPSAGLLSGYPFQCLGFTPEHQRDFIARDLGPTLANSTHHNVRLLILDDQRVLLPHWAKVVLTNPEAAKYVHGIAVHWYLDFLAPAKWTLGETHRLFPNTTLFASEACVGSHFWEQSVRLGSWDRGMQYSHSIIENLLYHVVGWTDWNLALNPEGGPNWVRNFVDSPIIVDITKDTFYKQPMFYHLGHFSKFIPEGSTRVGLVASQKNDLDAVALLHPDGSAVVVVLNRSSKDVPLTIKDPAVGFLETISPGYSIHTYLWRRQ

SEQ ID NO: 1325 - DNA, 1608 bp, synthetic construct
  misc_feature 1..1608: note = Variant of B-Glucocerebrosidase
  source 1..1608: mol_type = other DNA
atggagttttcttctcctagtagagaagaatgccccaagccactgagcagggtgagcatcatggctggatccctcacagggctgcttcttttgcaggcagtctcatgggcctctggagccaggccctgtattcccaagtcattcggctactcctcagtggtgtgtgtatgcaatgccacctattgtgacagtgtcgatcctctcactctccctgctctgggtaccttctcccggtatgagagcacaagaagtggaagacgcatggagctctcaatgggccctatacaggctaaccgcactgggacaggtctgctgctgaccctccaacctgaacagaagtttcagaaagtcaagggatttggaggagccatgactgatgcagcagcactcaacatcttggccctgtctccaccagcccagaacctgctgttgaagtcctacttctcagaggaggggattgagtacaacatcatccgggttcccatggctagctgtgacttctccattaggacctatacatacgctgacacccccgatgattttcagctccataatttcagtctccctgaagaagacaccaaatggaagatacctctgattcacagagccttgcaactgtcccaaaggccagtgagcctcttcgcttctccctggactagtcctacatggctgaagactaatggtgcttacaatgggaagggctccctgaaaggacagccaggtgacatatatcatcagacatgggcccgctactttgtgaaattccttgatgcctatgcagagcacgggctccaattctgggcagtcaccgcagaaaacgagccctcagctgggctgctgtctggctacccctttcagtgcttgggctttactcctgagcatcaacgggacttcattgcccgggatttggggccaacactggccaacagcacccaccacaatgtaagactcctcattctggatgaccagaggctgctgctccctcattgggccaaggtggtgttgacaaacccagaagctgccaaatatgttcatggcatcgctgtccactggtacctggattttttggcccctgccaagtggactctgggagagacccacagactcttccccaataccacactgtttgcatcagaagcctgcgtggggagcaacttctgggagcagtctgttaggctgggttcctgggatcggggcatgcaatattcccatagtataatagagaacctcctctaccacgtggtaggatggacagactggaatctggctttgaacccagaaggaggccccaattgggtgcgcaactttgttgacagccccatcattgtggatatcacaaaggacaccttctacaaacagcctatgttctatcatctggggcactttagcaagttcattccagagggttccactagagtaggcttggttgcctcacagaagaatgatctggatgctgtggcactcctgcatcctgacgggagtgcagtggtggtagtactgaacaggtctagcaaagatgttcccttgagcatcaaagacccagctgtgggctttctggaaaccatttcccctggatactctatccacacctatctctggagaagacag

SEQ ID NO: 1326 - protein, 536 aa, synthetic construct
  REGION 1..536: note = Variant of B-Glucocerebrosidase
MEFSSPSREECPKPLSRVSIMAGSLTGLLLLQAVSWASGARPCIPKSFGYSSVVCVCNATYCDSVDPLTLPALGTFSRYESTRSGRRMELSMGPIQANRTGTGLLLTLQPEQKFQKVKGFGGAMTDAAALNILALSPPAQNLLLKSYFSEEGIEYNIIRVPMASCDFSIRTYTYADTPDDFQLHNFSLPEEDTKWKIPLIHRALQLSQRPVSLFASPWTSPTWLKTNGAYNGKGSLKGQPGDIYHQTWARYFVKFLDAYAEHGLQFWAVTAENEPSAGLLSGYPFQCLGFTPEHQRDFIARDLGPTLANSTHHNVRLLILDDQRLLLPHWAKVVLTNPEAAKYVHGIAVHWYLDFLAPAKWTLGETHRLFPNTTLFASEACVGSNFWEQSVRLGSWDRGMQYSHSIIENLLYHVVGWTDWNLALNPEGGPNWVRNFVDSPIIVDITKDTFYKQPMFYHLGHFSKFIPEGSTRVGLVASQKNDLDAVALLHPDGSAVVVVLNRSSKDVPLSIKDPAVGFLETISPGYSIHTYLWRRQ

SEQ ID NO: 1327 - DNA, 1608 bp, synthetic construct
  misc_feature 1..1608: note = Variant of B-Glucocerebrosidase
  source 1..1608: mol_type = other DNA
atggagttttcttctcctagtagagaagaatgccccaagccactgagcagggtgagcatcatggctggatccctcacagggctgcttcttttgcaggcagtctcatgggcctctggagccaggccctgtattcccaagtcattcggctactcctcagtggtgtgtgtatgcaatgccacctattgtgacagtgtcgatcctctcactctccctgctctgggtaccttctcccggtatgagagcacaagaagtggaagacgcatggagctctcaatgggccctatacagcagaaccgcacagggacaggtctgctgctgaccctccaacctgaacagaagtttcagaaagtcaagggatttggaggagccatgactgatgcagcagcactcaacatcttggccctgtctccaccagcccagaacctgctgttgaagtcctacttctcagaggaggggattgagtacaacatcatccgggttcccatggctagctgtgacttctccattaggacctatacatacgctgacacccccgatgattttcagctccataatttcagtctccctgaagaagacaccaaatggaagatacctctgattcacagagccttgcaactgtcccaaaggccagtgagcctcttcgcttctccctggactagtcctacatggctgaagactaatggtgcttacaatgggaagggctccctgaaaggacagccaggtgacatatatcatcagacatgggcccgctactttgtgaaattccttgatgcctatgcagagcacgggctccaattctgggcagtcaccgcagaaaacgagccctcagctgggctgctgtctggctacccctttcagtgcttgggctttactcctgagcatcaacgggacttcattgcccgggatttggggccaacactggccaacagcacccaccacaatgtaagactcctcattctggatgaccagagggtcctgctccctcattgggccaaggtggtgttgacaaacccagaagctgccaaatatgttcatggcatcgctgtccactggtacctggattttttggcccctgccaagtggactctgggagagacccacagactcttccccaataccacactgtttgcatcagaagcctgcgtggggagcaacttctgggagcagtctgttaggctgggttcctgggatcggggcatgcaatattcccatagtataatagagaacctcctctaccacgtggtaggatggacagactggaatctggctttgaacccagaaggaggccccaattgggtgcgcaactttgttgacagccccatcattgtggatatcacaaaggacaccttctacaaacagcctatgttctatcatctggggcactttagcaagttcattccagagggttccactagagtaggcttggttgcctcacagaagaatgatctggatgctgtggcactcctgcatcctgacgggagtgcagtggtggtagtactgaacaggtctagcaaagatgttcccttgactatcaaagacccagctgtgggctttctggaaaccatttcccctggatactctatccacacctatctctggagaagacag

SEQ ID NO: 1328 - protein, 536 aa, synthetic construct
  REGION 1..536: note = Variant of B-Glucocerebrosidase
MEFSSPSREECPKPLSRVSIMAGSLTGLLLLQAVSWASGARPCIPKSFGYSSVVCVCNATYCDSVDPLTLPALGTFSRYESTRSGRRMELSMGPIQQNRTGTGLLLTLQPEQKFQKVKGFGGAMTDAAALNILALSPPAQNLLLKSYFSEEGIEYNIIRVPMASCDFSIRTYTYADTPDDFQLHNFSLPEEDTKWKIPLIHRALQLSQRPVSLFASPWTSPTWLKTNGAYNGKGSLKGQPGDIYHQTWARYFVKFLDAYAEHGLQFWAVTAENEPSAGLLSGYPFQCLGFTPEHQRDFIARDLGPTLANSTHHNVRLLILDDQRVLLPHWAKVVLTNPEAAKYVHGIAVHWYLDFLAPAKWTLGETHRLFPNTTLFASEACVGSNFWEQSVRLGSWDRGMQYSHSIIENLLYHVVGWTDWNLALNPEGGPNWVRNFVDSPIIVDITKDTFYKQPMFYHLGHFSKFIPEGSTRVGLVASQKNDLDAVALLHPDGSAVVVVLNRSSKDVPLTIKDPAVGFLETISPGYSIHTYLWRRQ

SEQ ID NO: 1329 - DNA, 1608 bp, synthetic construct
  misc_feature 1..1608: note = Variant of B-Glucocerebrosidase
  source 1..1608: mol_type = other DNA
atggagttttcttctcctagtagagaagaatgccccaagccactgagcagggtgagcatcatggctggatccctcacagggctgcttcttttgcaggcagtctcatgggcctctggagccaggccctgtattcccaagtcattcggctactcctcagtggtgtgtgtatgcaatgccacctattgtgacagtgtcgatcctctcactctcaccgctctgggtaccttctcccggtatgagagcacaagaagtggaagacgcatggagctctcaatgggccctatacaggctaaccgcactgggacaggtctgctgctgaccctccaacctgaacagaagtttcagaaagtcaagggatttggaggagccatgactgatgcagcagcactcaacatcttggccctgtctccaccagcccagaacctgctgttgaagtcctacttctcagaggaggggattgagtacaacatcatccgggttcccatggctagctgtgacttctccattaggacctatacatacgctgacacccccgatgattttcagctccataatttcagtctccctgaagaagacaccaaatggaagatacctctgattcacagagccttgcaactgtcccaaaggccagtgagcctcttcgcttctccctggactagtcctacatggctgaagactaatggtgcttacaatgggaagggctccctgaaaggacagccaggtgacatatatcatcagacatgggcccgctactttgtgaaattccttgatgcctatgcagagcacgggctccaattctgggcagtcaccgcagaaaacgagccctcagctgggctgctgtctggctacccctttcagtgcttgggctttactcctgagcatcaacgggacttcattgcccgggatttggggccaacactggccaacagcacccaccacaatgtaagactcctcattctggatgaccagaggctgctgctccctcattgggccaaggtggtgttgacaaacccagaagctgccaaatatgttcatggcatcgctgtccactggtacctggattttttggcccctgccaagtggactctgggagagacccacagactcttccccaataccacactgtttgcatcagaagcctgcgtggggagcaaattctgggagcagtctgttaggctgggttcctgggatcggggcatgcaatattcccatagtataatagagaacctcctctaccacgtggtaggatggacagactggaatctggctttgaacccagaaggaggccccaattgggtgcgcaactttgttgacagccccatcattgtggatatcacaaaggacaccttctacaaacagcctatgttctatcatctggggcactttagcaagttcattccagagggttccactagagtaggcttggttgcctcacagaagaatgatctggatgctgtggcactcctgcatcctgacgggagtgcagtggtggtagtactgaacaggtctagcaaagatgttcccttgactatcaaagacccagctgtgggctttctggaaaccatttcccctggatactctatccacacctatctctggagaagacag

SEQ ID NO: 1330 - protein, 536 aa, synthetic construct
  REGION 1..536: note = Variant of B-Glucocerebrosidase
MEFSSPSREECPKPLSRVSIMAGSLTGLLLLQAVSWASGARPCIPKSFGYSSVVCVCNATYCDSVDPLTLTALGTFSRYESTRSGRRMELSMGPIQANRTGTGLLLTLQPEQKFQKVKGFGGAMTDAAALNILALSPPAQNLLLKSYFSEEGIEYNIIRVPMASCDFSIRTYTYADTPDDFQLHNFSLPEEDTKWKIPLIHRALQLSQRPVSLFASPWTSPTWLKTNGAYNGKGSLKGQPGDIYHQTWARYFVKFLDAYAEHGLQFWAVTAENEPSAGLLSGYPFQCLGFTPEHQRDFIARDLGPTLANSTHHNVRLLILDDQRLLLPHWAKVVLTNPEAAKYVHGIAVHWYLDFLAPAKWTLGETHRLFPNTTLFASEACVGSKFWEQSVRLGSWDRGMQYSHSIIENLLYHVVGWTDWNLALNPEGGPNWVRNFVDSPIIVDITKDTFYKQPMFYHLGHFSKFIPEGSTRVGLVASQKNDLDAVALLHPDGSAVVVVLNRSSKDVPLTIKDPAVGFLETISPGYSIHTYLWRRQ

SEQ ID NO: 1331 - DNA, 1608 bp, synthetic construct
  misc_feature 1..1608: note = Variant of B-Glucocerebrosidase
  source 1..1608: mol_type = other DNA
atggagttttcttctcctagtagagaagaatgccccaagccactgagcagggtgagcatcatggctggatccctcacagggctgcttcttttgcaggcagtctcatgggcctctggagccaggccctgtattcccaagtcattcggctactcctcagtggtgtgtgtatgcaatgccacctattgtgacagtgtcgatcctctcactctccctgctctgggtaccttctcccggtatgagagcacaagaagtggaagacgcatggagctctcaatgggccctatacagcagaaccgcacagggacaggtctgctgctgaccctccaacctgaacagaagtttcagaaagtcaagggatttggaggagccatgactgatgcagcagcactcaacatcttggccctgtctccaccagcccagaacctgctgttgaagtcctacttctcagaggaggggattgagtacaacatcatccgggttcccatggctagctgtgacttctccattaggacctatacatacgctgacacccccgatgattttcagctccataatttcagtctccctgaagaagacaccaaatggaagatacctctgattcaccaggccttgcaactgtcccaaaggccagtgagcctcttcgcttctccctggactagtcctacatggctgaagactaatggtgcttacaatgggaagggctccctgaaaggacagccaggtgacatatatcatcagacatgggcccgctactttgtgaaattccttgatgcctatgcagagcacgggctccaattctgggcagtcaccgcagaaaacgagccctcagctgggctgctgtctggctacccctttcagtgcttgggctttactcctgagcatcaacgggacttcattgcccgggatttggggccaacactggccaacagcacccaccacaatgtaagactcctcattctggatgaccagagggtcctgctccctcattgggccaaggtggtgttgacaaacccagaagctgccaaatatgttcatggcatcgctgtccactggtacctggattttttggcccctgccgagtggactctgggagagacccacagactcttccccaataccacactgtttgcatcagaagcctgcgtggggagcggattctgggagcagtctgttaggctgggttcctgggatcggggcatgcaatattcccatagtataatagagaacctcctctaccacgtggtaggatggacagactggaatctggctttgaacccagaaggaggccccaattgggtgcgcaactttgttgacagccccatcattgtggatatcacaaaggacaccttctacaaacagcctatgttctatcatctggggcactttagcaagttcattccagagggttccactagagtaggcttggttgcctcacagaagaatgatctggatgctgtggcactcctgcatcctgacgggagtgcagtggtggtagtactgaacaggtctagcaaagatgttcccttgagcatcaaagacccagctgtgggctttctggaaaccatttcccctggatactctatccacacctatctctggagaagacag

SEQ ID NO: 1332 - protein, 536 aa, synthetic construct
  REGION 1..536: note = Variant of B-Glucocerebrosidase
MEFSSPSREECPKPLSRVSIMAGSLTGLLLLQAVSWASGARPCIPKSFGYSSVVCVCNATYCDSVDPLTLPALGTFSRYESTRSGRRMELSMGPIQQNRTGTGLLLTLQPEQKFQKVKGFGGAMTDAAALNILALSPPAQNLLLKSYFSEEGIEYNIIRVPMASCDFSIRTYTYADTPDDFQLHNFSLPEEDTKWKIPLIHQALQLSQRPVSLFASPWTSPTWLKTNGAYNGKGSLKGQPGDIYHQTWARYFVKFLDAYAEHGLQFWAVTAENEPSAGLLSGYPFQCLGFTPEHQRDFIARDLGPTLANSTHHNVRLLILDDQRVLLPHWAKVVLTNPEAAKYVHGIAVHWYLDFLAPAEWTLGETHRLFPNTTLFASEACVGSGFWEQSVRLGSWDRGMQYSHSIIENLLYHVVGWTDWNLALNPEGGPNWVRNFVDSPIIVDITKDTFYKQPMFYHLGHFSKFIPEGSTRVGLVASQKNDLDAVALLHPDGSAVVVVLNRSSKDVPLSIKDPAVGFLETISPGYSIHTYLWRRQ

SEQ ID NO: 1333 - DNA, 1608 bp, synthetic construct
  misc_feature 1..1608: note = Variant of B-Glucocerebrosidase
  source 1..1608: mol_type = other DNA
atggagttttcttctcctagtagagaagaatgccccaagccactgagcagggtgagcatcatggctggatccctcacagggctgcttcttttgcaggcagtctcatgggcctctggagccaggccctgtattcccaagtcattcggctactcctcagtggtgtgtgtatgcaatgccacctattgtgacagtgtcgatcctctcactctccctgctctgggtaccttctcccggtatgagagcacaagaagtggaagacgcatggagctctcaatgggccctatacaggctaaccgcactgggacaggtctgctgctgaccctccaacctgaacagaagtttcagaaagtcaagggatttggaggagccatgactgatgcagcagcactcaacatcttggccctgtctccaccagcccagaacctgctgttgaagtcctacttctcagaggaggggattgagtacaacatcatccgggttcccatggctagctgtgacttctccattaggacctatacatacgctgacacccccgatgattttcagctccataatttcagtctccctgaagaagacaccaaatggaagatacctctgattcacagagccttgcaactgtcccaaaggccagtgagcctcttcgcttctccctggactagtcctacatggctgaagactaatggtgcttacaatgggaagggctccctgaaaggacagccaggtgacatatatcatcagacatgggcccgctactttgtgaaattccttgatgcctatgcagagcacgggctccaattctgggcagtcaccgcagaaaacgagccctcagctgggctgctgtctggctacccctttcagtgcttgggctttactcctgagcatcaacgggacttcattgcccgggatttggggccaacactggccaacagcacccaccacaatgtaagactcctcattctggatgaccagaggctgctgctccctcattgggccaaggtggtgttgacaaacccagaagctgccaaatatgttcatggcatcgctgtccactggtacctggattttttggcccctgccaagtggactctgggagagacccacagactcttccccaataccacactgtttgcatcagaagcctgcgtggggagcaaattctgggagcagtctgttaggctgggttcctgggatcggggcatgcaatattcccatagtataatagagaacctcctctaccacgtggtaggatggacagactggaatctggctttgaacccagaaggaggccccaattgggtgcgcaactttgttgacagccccatcattgtggatatcacaaaggacaccttctacaaacagcctatgttctatcatctggggcactttagcaagttcattccagagggttccactagagtaggcttggttgcctcacagaagaatgatctggatgctgtggcactcctgcatcctgacgggagtgcagtggtggtagtactgaaccagtctagcaaagatgttcccttgactatcaaagacccagctgtgggctttctggaaaccatttcccctggatactctatccacacctatctctggagaagacag

SEQ ID NO: 1334 - protein, 536 aa, synthetic construct
  REGION 1..536: note = Variant of B-Glucocerebrosidase
MEFSSPSREECPKPLSRVSIMAGSLTGLLLLQAVSWASGARPCIPKSFGYSSVVCVCNATYCDSVDPLTLPALGTFSRYESTRSGRRMELSMGPIQANRTGTGLLLTLQPEQKFQKVKGFGGAMTDAAALNILALSPPAQNLLLKSYFSEEGIEYNIIRVPMASCDFSIRTYTYADTPDDFQLHNFSLPEEDTKWKIPLIHRALQLSQRPVSLFASPWTSPTWLKTNGAYNGKGSLKGQPGDIYHQTWARYFVKFLDAYAEHGLQFWAVTAENEPSAGLLSGYPFQCLGFTPEHQRDFIARDLGPTLANSTHHNVRLLILDDQRLLLPHWAKVVLTNPEAAKYVHGIAVHWYLDFLAPAKWTLGETHRLFPNTTLFASEACVGSKFWEQSVRLGSWDRGMQYSHSIIENLLYHVVGWTDWNLALNPEGGPNWVRNFVDSPIIVDITKDTFYKQPMFYHLGHFSKFIPEGSTRVGLVASQKNDLDAVALLHPDGSAVVVVLNQSSKDVPLTIKDPAVGFLETISPGYSIHTYLWRRQ

SEQ ID NO: 1335 - DNA, 1608 bp, synthetic construct
  misc_feature 1..1608: note = Variant of B-Glucocerebrosidase
  source 1..1608: mol_type = other DNA
atggagttttcttctcctagtagagaagaatgccccaagccactgagcagggtgagcatcatggctggatccctcacagggctgcttcttttgcaggcagtctcatgggcctctggagccaggccctgtattcccaagtcattcggctactcctcagtggtgtgtgtatgcaatgccacctattgtgacagtgtcgatcctctcactctcaccgctctgggtaccttctcccggtatgagagcacaagaagtggaagacgcatggagctctcaatgggccctatacagcagaaccgcacagggacaagtctgctgctgaccctccaacctgaacagaagtttcagaaagtcaagggatttggaggagccatgactgatgcagcagcactcaacatcttggccctgtctccaccagcccagaacctgctgttgaagtcctacttctcagaggaggggattgagtacaacatcatccgggttcccatggctagctgtgacttctccattaggacctatacatacgctgacacccccgatgattttcagctccataatttcagtctccctgaagaagacaccaaatggaagatacctctgattcacagagccttgcaactgtcccaaaggccagtgagcctcttcgcttctccctggactagtcctacatggctgaagactaatggtgcttacaatgggaagggctccctgaaaggacagccaggtgacatatatcatcagacatgggcccgctactttgtgaaattccttgatgcctatgcagagcacgggctccaattctgggcagtcaccgcagaaaacgagccctcagctgggctgctgtctggctacccctttcagtgcttgggctttactcctgagcatcaacgggacttcattgcccgggatttggggccaacactggccaacagcacccaccacaatgtaagactcctcattctggatgaccagagggtcctgctccctcattgggccaaggtggtgttgacaaacccagaagctgccaaatatgttcatggcatcgctgtccactggtacctggattttttggcccctgccaagtggactctgggagagacccacagactcttccccaataccacactgtttgcatcagaagcctgcgtggggagcaaattctgggagcagtctgttaggctgggttcctgggatcggggcatgcaatattcccatagtataatagagaacctcctctaccacgtggtaggatggacagactggaatctggctttgaacccagaaggaggccccaattgggtgcgcaactttgttgacagccccatcattgtggatatcacaaaggacaccttctacaaacagcctatgttctatcatctggggcactttagcaagttcattccagagggttccactagagtaggcttggttgcctcacagaagaatgatctggatgctgtggcactcctgcatcctgacgggagtgcagtggtggtagtactgaacaggtctagcaaagatgttcccttgactatcaaagacccagctgtgggctttctggaaaccatttcccctggatactctatccacacctatctctggagaagacag

SEQ ID NO: 1336 - protein, 536 aa, synthetic construct
  REGION 1..536: note = Variant of B-Glucocerebrosidase
MEFSSPSREECPKPLSRVSIMAGSLTGLLLLQAVSWASGARPCIPKSFGYSSVVCVCNATYCDSVDPLTLTALGTFSRYESTRSGRRMELSMGPIQQNRTGTSLLLTLQPEQKFQKVKGFGGAMTDAAALNILALSPPAQNLLLKSYFSEEGIEYNIIRVPMASCDFSIRTYTYADTPDDFQLHNFSLPEEDTKWKIPLIHRALQLSQRPVSLFASPWTSPTWLKTNGAYNGKGSLKGQPGDIYHQTWARYFVKFLDAYAEHGLQFWAVTAENEPSAGLLSGYPFQCLGFTPEHQRDFIARDLGPTLANSTHHNVRLLILDDQRVLLPHWAKVVLTNPEAAKYVHGIAVHWYLDFLAPAKWTLGETHRLFPNTTLFASEACVGSKFWEQSVRLGSWDRGMQYSHSIIENLLYHVVGWTDWNLALNPEGGPNWVRNFVDSPIIVDITKDTFYKQPMFYHLGHFSKFIPEGSTRVGLVASQKNDLDAVALLHPDGSAVVVVLNRSSKDVPLTIKDPAVGFLETISPGYSIHTYLWRRQ

SEQ ID NO: 1337 - DNA, 1608 bp, synthetic construct
  misc_feature 1..1608: note = Variant of B-Glucocerebrosidase
  source 1..1608: mol_type = other DNA
atggagttttcttctcctagtagagaagaatgccccaagccactgagcagggtgagcatcatggctggatccctcacagggctgcttcttttgcaggcagtctcatgggcctctggagccaggccctgtattcccaagtcattcggctactcctcagtggtgtgtgtatgcaatgccacctattgtgacagtgtcgatcctctcactctccctgctctgggtaccttctcccggtatgagagcacaagaagtggaagacgcatggagctctcaatgggccctatacaggctaaccgcagggggacaggtctgctgctgaccctccaacctgaacagaagtttcagaaagtcaagggatttggaggagccatgactgatgcagcagcactcaacatcttggccctgtctccaccagcccagaacctgctgttgaagtcctacttctcagaggaggggattgagtacaacatcatccgggttcccatggctagctgtgacttctccattaggacctatacatacgctgacacccccgatgattttcagctccataatttcagtctccctgaagaagacaccaaatggaagatacctctgattcacagagccttgcaactgtcccaaaggccagtgagcctcttcgcttctccctggactagtcctacatggctgaagactaatggtgcttacaatgggaagggctccctgaaaggacagccaggtgacatatatcatcagacatgggcccgctactttgtgaaattccttgatgcctatgcagagcacgggctccaattctgggcagtcaccgcagaaaacgagccctcagctgggctgctgtctggctacccctttcagtgcttgggctttactcctgagcatcaacgggacttcattgcccgggatttggggccaacactggccaacagcacccaccacaatgtaagactcctcattctggatgaccagagggtcctgctccctcattgggccaaggtggtgttgacaaacccagaagctgccaaatatgttcatggcatcgctgtccactggtacctggattttttggcccctgccaagtggactctgggagagacccacagactcttccccaataccacactgtttgcatcagaagcctgcgtggggagccacttctgggagcagtctgttaggctgggttcctgggatcggggcatgcaatattcccatagtataatagagaacctcctctaccacgtggtaggatggacagactggaatctggctttgaacccagaaggaggccccaattgggtgcgcaactttgttgacagccccatcattgtggatatcacaaaggacaccttctacaaacagcctatgttctatcatctggggcactttagcaagttcattccagagggttccactagagtaggcttggttgcctcacagaagaatgatctggatgctgtggcactcctgcatcctgacgggagtgcagtggtggtagtactgaaccagtctagcaaagatgttcccttgagcatcaaagacccagctgtgggctttctggaaaccatttcccctggatactctatccacacctatctctggagaagacag

SEQ ID NO: 1338 - protein, 536 aa, synthetic construct
  REGION 1..536: note = Variant of B-Glucocerebrosidase
MEFSSPSREECPKPLSRVSIMAGSLTGLLLLQAVSWASGARPCIPKSFGYSSVVCVCNATYCDSVDPLTLPALGTFSRYESTRSGRRMELSMGPIQANRRGTGLLLTLQPEQKFQKVKGFGGAMTDAAALNILALSPPAQNLLLKSYFSEEGIEYNIIRVPMASCDFSIRTYTYADTPDDFQLHNFSLPEEDTKWKIPLIHRALQLSQRPVSLFASPWTSPTWLKTNGAYNGKGSLKGQPGDIYHQTWARYFVKFLDAYAEHGLQFWAVTAENEPSAGLLSGYPFQCLGFTPEHQRDFIARDLGPTLANSTHHNVRLLILDDQRVLLPHWAKVVLTNPEAAKYVHGIAVHWYLDFLAPAKWTLGETHRLFPNTTLFASEACVGSHFWEQSVRLGSWDRGMQYSHSIIENLLYHVVGWTDWNLALNPEGGPNWVRNFVDSPIIVDITKDTFYKQPMFYHLGHFSKFIPEGSTRVGLVASQKNDLDAVALLHPDGSAVVVVLNQSSKDVPLSIKDPAVGFLETISPGYSIHTYLWRRQ

SEQ ID NO: 1339 - DNA, 1608 bp, synthetic construct
  misc_feature 1..1608: note = Variant of B-Glucocerebrosidase
  source 1..1608: mol_type = other DNA
atggagttttcttctcctagtagagaagaatgccccaagccactgagcagggtgagcatcatggctggatccctcacagggctgcttcttttgcaggcagtctcatgggcctctggagccaggccctgtattcccaagtcattcggctactcctcagtggtgtgtgtatgcaatgccacctattgtgacagtgtcgatcctctcactctcaccgctctgggtaccttctcccggtatgagagcacaagaagtggaagacgcatggagctctcaatgggccctatacaggctaaccgcactgggacaggtctgctgctgaccctccaacctgaacagaagtttcagaaagtcaagggatttggaggagccatgactgatgcagcagcactcaacatcttggccctgtctcaaccagcccagaacctgctgttgaagtcctacttctcagaggaggggattgagtacaacatcatccgggttcccatggctagctgtgacttctccattaggacctatacatacgatgacacccccgatgattttcagctccataatttcagtctccctgaagaagacaccaaatggaagatacctctgattcacagagccttgcaactgtcccaaaggccagtgagcctcttcgcttctccctggactagtcctacatggctgaagactaatggtgcttacaatgggaagggctccctgaaaggacagccaggtgacatatatcatcagacatgggcccgctactttgtgaaattccttgatgcctatgcagagcacgggctccaattctgggcagtcaccgcagaaaacgagccctcagctgggctgctgtctggctacccctttcagtgcttgggctttactcctgagcatcaacgggacttcattgcccgggatttggggccaacactggccaacagcacccaccacaatgtaagactcctcattctggatgaccagagggtcctgctccctcattgggccaaggtggtgttgacaaacccagaagctgccaaatatgttcatggcatcgctgtccactggtacctggattttttggcccctgccgagtggactctgggagagacccacagactcttccccaataccacactgtttgcatcagaagcctgcgtggggagccacttctgggagcagtctgttaggctgggttcctgggatcggggcatgcaatattcccatagtataatagagaacctcctctaccacgtggtaggatggacagactggaatctggctttgaacccagaaggaggccccaattgggtgcgcaactttgttgacagccccatcattgtggatatcacaaaggacaccttctacaaacagcctatgttctatcatctggggcactttagcaagttcattccagagggttccactagagtaggcttggttgcctcacagaagaatgatctggatgctgtggcactcctgcatcctgacgggagtgcagtggtggtagtactgaaccagtctagcaaagatgttcccttgactatcaaagacccagctgtgggctttctggaaaccatttcccctggatactctatccacacctatctctggagaagacag

SEQ ID NO: 1340 - protein, 536 aa, synthetic construct
  REGION 1..536: note = Variant of B-Glucocerebrosidase
MEFSSPSREECPKPLSRVSIMAGSLTGLLLLQAVSWASGARPCIPKSFGYSSVVCVCNATYCDSVDPLTLTALGTFSRYESTRSGRRMELSMGPIQANRTGTGLLLTLQPEQKFQKVKGFGGAMTDAAALNILALSQPAQNLLLKSYFSEEGIEYNIIRVPMASCDFSIRTYTYDDTPDDFQLHNFSLPEEDTKWKIPLIHRALQLSQRPVSLFASPWTSPTWLKTNGAYNGKGSLKGQPGDIYHQTWARYFVKFLDAYAEHGLQFWAVTAENEPSAGLLSGYPFQCLGFTPEHQRDFIARDLGPTLANSTHHNVRLLILDDQRVLLPHWAKVVLTNPEAAKYVHGIAVHWYLDFLAPAEWTLGETHRLFPNTTLFASEACVGSHFWEQSVRLGSWDRGMQYSHSIIENLLYHVVGWTDWNLALNPEGGPNWVRNFVDSPIIVDITKDTFYKQPMFYHLGHFSKFIPEGSTRVGLVASQKNDLDAVALLHPDGSAVVVVLNQSSKDVPLTIKDPAVGFLETISPGYSIHTYLWRRQ

SEQ ID NO: 1341 - DNA, 1608 bp, synthetic construct
  misc_feature 1..1608: note = Variant of B-Glucocerebrosidase
  source 1..1608: mol_type = other DNA
atggagttttcttctcctagtagagaagaatgccccaagccactgagcagggtgagcatcatggctggatccctcacagggctgcttcttttgcaggcagtctcatgggcctctggagccaggccctgtattcccaagtcattcggctactcctcagtggtgtgtgtatgcaatgccacctattgtgacagtgtcgatcctctcactctcaccgctctgggtaccttctcccggtatgagagcacaagaagtggaagacgcatggagctctcaatgggccctatacaggctaaccgcactgggacaggtctgctgctgaccctccaacctgaacagaagtttcagaaagtcaagggatttggaggagccatgactgatgcagcagcactcaacatcttggccctgtctccaccagcccagaacctgctgttgaagtcctacttctcagaggaggggattgagtacaacatcatccgggttcccatggctagctgtgacttctccattaggacctatacatacgctgacacccccgatgattttcagctccataatttcagtctccctgaagaagacaccaaatggaagatacctctgattcacagagccttgcaactgtcccaaaggccagtgagcctcttcgcttctccctggactagtcctacatggctgaagactaatggtgcttacaatgggaagggctccctgaaaggacagccaggtgacatatatcatcagacatgggcccgctactttgtgaaattccttgatgcctatgcagagcacgggctccaattctgggcagtcaccgcagaaaacgagcccacagctgggctgctgtctggctacccctttcagtgcttgggctttactcctgagcatcaacgggacttcattgcccgggatttggggccaacactggccaacagcacccaccacaatgtaagactcctcattctggatgaccagagggtcctgctccctcattgggccaaggtggtgttgacaaacccagaagctgccaaatatgttcatggcatcgctgtccactggtacctggattttttggcccctgccaagtggactctgggagagacccacagactcttccccaataccacactgtttgcatcagaagcctgcgtggggagcagattctgggagcagtctgttaggctgggttcctgggatcggggcatgcaatattcccatagtataatagagaacctcctctaccacgtggtaggatggacagactggaatctggctttgaacccagaaggaggccccaattgggtgcgcaactttgttgacagccccatcattgtggatatcacaaaggacaccttctacaaacagcctatgttctatcatctggggcactttagcaagttcattccagagggttccactagagtaggcttggttgcctcacagaagaatgatctggatgctgtggcactcctgcatcctgacgggagtgcagtggtggtagtactgaacaggtctagcaaagatgttcccttgagcatcaaagacccagctgtgggctttctggaaaccatttcccctggatactctatccacacctatctctggagaagacag

SEQ ID NO: 1342 - protein, 536 aa, synthetic construct
  REGION 1..536: note = Variant of B-Glucocerebrosidase
MEFSSPSREECPKPLSRVSIMAGSLTGLLLLQAVSWASGARPCIPKSFGYSSVVCVCNATYCDSVDPLTLTALGTFSRYESTRSGRRMELSMGPIQANRTGTGLLLTLQPEQKFQKVKGFGGAMTDAAALNILALSPPAQNLLLKSYFSEEGIEYNIIRVPMASCDFSIRTYTYADTPDDFQLHNFSLPEEDTKWKIPLIHRALQLSQRPVSLFASPWTSPTWLKTNGAYNGKGSLKGQPGDIYHQTWARYFVKFLDAYAEHGLQFWAVTAENEPTAGLLSGYPFQCLGFTPEHQRDFIARDLGPTLANSTHHNVRLLILDDQRVLLPHWAKVVLTNPEAAKYVHGIAVHWYLDFLAPAKWTLGETHRLFPNTTLFASEACVGSRFWEQSVRLGSWDRGMQYSHSIIENLLYHVVGWTDWNLALNPEGGPNWVRNFVDSPIIVDITKDTFYKQPMFYHLGHFSKFIPEGSTRVGLVASQKNDLDAVALLHPDGSAVVVVLNRSSKDVPLSIKDPAVGFLETISPGYSIHTYLWRRQ

SEQ ID NO: 1343 - DNA, 1608 bp, synthetic construct
  misc_feature 1..1608: note = Variant of B-Glucocerebrosidase
  source 1..1608: mol_type = other DNA
atggagttttcttctcctagtagagaagaatgccccaagccactgagcagggtgagcatcatggctggatccctcacagggctgcttcttttgcaggcagtctcatgggcctctggagccaggccctgtattcccaagtcattcggctactcctcagtggtgtgtgtatgcaatgccacctattgtgacagtgtcgatcctctcactctcaccgctctgggtaccttctcccggtatgagagcacaagaagtggaagacgcatggagctctcaatgggccctatacaggctaaccgcactgggacaggtctgctgctgaccctccaacctgaacagaagtttcagaaagtcaagggatttggaggagccatgactgatgcagcagcactcaacatcttggccctgtctccaccagcccagaacctgctgttgaagtcctacttctcagaggaggggattgagtacaacatcatccgggttcccatggctagctgtgacttctccattaggacctatacatacgatgacacccccgatgattttcagctccataatttcagtctccctgaagaagacaccaaatggaagatacctctgattcacagagccttgcaactgtcccaaaggccagtgagcctcttcgcttctccctggactagtcctacatggctgaagactaatggtgcttacaatgggaagggctccctgaaaggacagccaggtgacatatatcatcagacatgggcccgctactttgtgaaattccttgatgcctatgcagagcacgggctccaattctgggcagtcaccgcagaaaacgagccctcagctgggctgctgtctggctacccctttcagtgcttgggctttactcctgagcatcaacgggacttcattgcccgggatttggggccaacactggccaacagcacccaccacaatgtaagactcctcattctggatgaccagaggctgctgctccctcattgggccaaggtggtgttgacaaacccagaagctgccaaatatgttcatggcatcgctgtccactggtacctggattttttggcccctgccgagtggactctgggagagacccacagactcttccccaataccacactgtttgcatcagaagcctgcgtggggagcaacttctgggagcagtctgttaggctgggttcctgggatcggggcatgcaatattcccatagtataatagagaacctcctctaccacgtggtaggatggacagactggaatctggctttgaacccagaaggaggccccaattgggtgcgcaactttgttgacagccccatcattgtggatatcacaaaggacaccttctacaaacagcctatgttctatcatctggggcactttagcaagttcattccagagggttccactagagtaggcttggttgcctcacagaagaatgatctggatgctgtggcactcctgcatcctgacgggagtgcagtggtggtagtactgaaccagtctagcaaagatgttcccttgactatcaaagacccagctgtgggctttctggaaaccatttcccctggatactctatccacacctatctctggagaagacag

SEQ ID NO: 1344 - protein, 536 aa, synthetic construct
  REGION 1..536: note = Variant of B-Glucocerebrosidase
MEFSSPSREECPKPLSRVSIMAGSLTGLLLLQAVSWASGARPCIPKSFGYSSVVCVCNATYCDSVDPLTLTALGTFSRYESTRSGRRMELSMGPIQANRTGTGLLLTLQPEQKFQKVKGFGGAMTDAAALNILALSPPAQNLLLKSYFSEEGIEYNIIRVPMASCDFSIRTYTYDDTPDDFQLHNFSLPEEDTKWKIPLIHRALQLSQRPVSLFASPWTSPTWLKTNGAYNGKGSLKGQPGDIYHQTWARYFVKFLDAYAEHGLQFWAVTAENEPSAGLLSGYPFQCLGFTPEHQRDFIARDLGPTLANSTHHNVRLLILDDQRLLLPHWAKVVLTNPEAAKYVHGIAVHWYLDFLAPAEWTLGETHRLFPNTTLFASEACVGSNFWEQSVRLGSWDRGMQYSHSIIENLLYHVVGWTDWNLALNPEGGPNWVRNFVDSPIIVDITKDTFYKQPMFYHLGHFSKFIPEGSTRVGLVASQKNDLDAVALLHPDGSAVVVVLNQSSKDVPLTIKDPAVGFLETISPGYSIHTYLWRRQ

SEQ ID NO: 1345 - DNA, 1608 bp, synthetic construct
  misc_feature 1..1608: note = Variant of B-Glucocerebrosidase
  source 1..1608: mol_type = other DNA
atggagttttcttctcctagtagagaagaatgccccaagccactgagcagggtgagcatcatggctggatccctcacagggctgcttcttttgcaggcagtctcatgggcctctggagccaggccctgtattcccaagtcattcggctactcctcagtggtgtgtgtatgcaatgccacctattgtgacagtgtcgatcctctcactctccctgctctgggtaccttctcccggtatgagagcacaagaagtggaagacgcatggagctctcaatgggccctatacaggctaaccgcagggggacaggtctgctgctgaccctccaacctgaacagaagtttcagaaagtcaagggatttggaggagccatgactgatgcagcagcactcaacatcttggccctgtctccaccagcccagaacctgctgttgaagtcctacttctcagaggaggggattgagtacaacatcatccgggttcccatggctagctgtgacttctccattaggacctatacatacgatgacacccccgatgattttcagctccataatttcagtctccctgaagaagacaccaaatggaagatacctctgattcacagagccttgcaactgtcccaaaggccagtgagcctcttcgcttctccctggactagtcctacatggctgaagactaatggtgcttacaatgggaagggctccctgaaaggacagccaggtgacatatatcatcagacatgggcccgctactttgtgaaattccttgatgcctatgcagagcacgggctccaattctgggcagtcaccgcagaaaacgagccctcagctgggctgctgtctggctacccctttcagtgcttgggctttactcctgagcatcaacgggacttcattgcccgggatttggggccaacactggccaacagcacccaccacaatgtaagactcctcattctggatgaccagagggtcctgctccctcattgggccaaggtggtgttgacaaacccagaagctgccaaatatgttcatggcatcgctgtccactggtacctggattttttggcccctgccaagtggactctgggagagacccacagactcttccccaataccacactgtttgcatcagaagcctgcgtggggagcaacttctgggagcagtctgttaggctgggttcctgggatcggggcatgcaatattcccatagtataatagagaacctcctctaccacgtggtaggatggacagactggaatctggctttgaacccagaaggaggccccaattgggtgcgcaactttgttgacagccccatcattgtggatatcacaaaggacaccttctacaaacagcctatgttctatcatctggggcactttagcaagttcattccagagggttccactagagtaggcttggttgcctcacagaagaatgatctggatgccgtggcactcgaacatcctgacgggagtgcagtggtggtagtactgaaccagtctagcaaagatgttcccttgactatcaaagacccagctgtgggctttctggaaaccatttcccctggatactctatccacacctatctctggagaagacag

SEQ ID NO: 1346 - protein, 536 aa, synthetic construct
  REGION 1..536: note = Variant of B-Glucocerebrosidase
MEFSSPSREECPKPLSRVSIMAGSLTGLLLLQAVSWASGARPCIPKSFGYSSVVCVCNATYCDSVDPLTLPALGTFSRYESTRSGRRMELSMGPIQANRRGTGLLLTLQPEQKFQKVKGFGGAMTDAAALNILALSPPAQNLLLKSYFSEEGIEYNIIRVPMASCDFSIRTYTYDDTPDDFQLHNFSLPEEDTKWKIPLIHRALQLSQRPVSLFASPWTSPTWLKTNGAYNGKGSLKGQPGDIYHQTWARYFVKFLDAYAEHGLQFWAVTAENEPSAGLLSGYPFQCLGFTPEHQRDFIARDLGPTLANSTHHNVRLLILDDQRVLLPHWAKVVLTNPEAAKYVHGIAVHWYLDFLAPAKWTLGETHRLFPNTTLFASEACVGSNFWEQSVRLGSWDRGMQYSHSIIENLLYHVVGWTDWNLALNPEGGPNWVRNFVDSPIIVDITKDTFYKQPMFYHLGHFSKFIPEGSTRVGLVASQKNDLDAVALEHPDGSAVVVVLNQSSKDVPLTIKDPAVGFLETISPGYSIHTYLWRRQ

SEQ ID NO: 1347 - DNA, 1608 bp, synthetic construct
  misc_feature 1..1608: note = Variant of B-Glucocerebrosidase
  source 1..1608: mol_type = other DNA
atggagttttcttctcctagtagagaagaatgccccaagccactgagcagggtgagcatcatggctggatccctcacagggctgcttcttttgcaggcagtctcatgggcctctggagccaggccctgtattcccaagtcattcggctactcctcagtggtgtgtgtatgcaatgccacctattgtgacagtgtcgatcctctcactctcaccgctctgggtaccttctcccggtatgagagcacaagaagtggaagacgcatggagctctcaatgggccctatacaggctaaccgcacagggacaggtctgctgctgaccctccaacctgaacagaagtttcagaaagtcaagggatttggaggagccatgactgatgcagcagcactcaacatcttggccctgtctccaccagcccagaacctgctgttgaagtcctacttctcagaggaggggattgagtacaacatcatccgggttcccatggctagctgtgacttctccattaggacctatacatacgatgacacccccgatgattttcagctccataatttcagtctccctgaagaagacaccaaatggaagatacctctgattcacagagccttgcaactgtcccaaaggccagtgagcctcttcgcttctccctggactagtcctacatggctgaagactaatggtgcttacaatgggaagggctccctgaaaggacagccaggtgacatatatcatcagacatgggcccgctactttgtgaaattccttgatgcctatgcagagcacgggctccaattctgggcagtcaccgcagaaaacgagccctcagctgggctgctgtctggctacccctttcagtgcttgggctttactcctgagcatcaacgggacttcattgcccgggatttggggccaacactggccaacagcacccaccacaatgtaagactcctcattctggatgaccagaggctgctgctccctcattgggccaaggtggtgttgacaaacccagaagctgccaaatatgttcatggcatcgctgtccactggtacctggattttttggcccctgccgagtggactctgggagagacccacagactcttccccaataccacactgtttgcatcagaagcctgcgtggggagccacttctgggagcagtctgttaggctgggttcctgggatcggggcatgcaatattcccatagtataatagagaacctcctctaccacgtggtaggatggacagactggaatctggctttgaacccagaaggaggccccaattgggtgcgcaactttgttgacagccccatcattgtggatatcacaaaggacaccttctacaaacagcctatgttctatcatctggggcactttagcaagttcattccagagggttccactagagtaggcttggttgcctcacagaagaatgatctggatagcgtggcactcctgcatcctgacgggagtgcagtggtggtagtactgaaccagtctagcaaagatgttcccttgactatcaaagacccagctgtgggctttctggaaaccatttcccctggatactctatccacacctatctctggagaagacag

SEQ ID NO: 1348 - protein, 536 aa, synthetic construct
  REGION 1..536: note = Variant of B-Glucocerebrosidase
MEFSSPSREECPKPLSRVSIMAGSLTGLLLLQAVSWASGARPCIPKSFGYSSVVCVCNATYCDSVDPLTLTALGTFSRYESTRSGRRMELSMGPIQANRTGTGLLLTLQPEQKFQKVKGFGGAMTDAAALNILALSPPAQNLLLKSYFSEEGIEYNIIRVPMASCDFSIRTYTYDDTPDDFQLHNFSLPEEDTKWKIPLIHRALQLSQRPVSLFASPWTSPTWLKTNGAYNGKGSLKGQPGDIYHQTWARYFVKFLDAYAEHGLQFWAVTAENEPSAGLLSGYPFQCLGFTPEHQRDFIARDLGPTLANSTHHNVRLLILDDQRLLLPHWAKVVLTNPEAAKYVHGIAVHWYLDFLAPAEWTLGETHRLFPNTTLFASEACVGSHFWEQSVRLGSWDRGMQYSHSIIENLLYHVVGWTDWNLALNPEGGPNWVRNFVDSPIIVDITKDTFYKQPMFYHLGHFSKFIPEGSTRVGLVASQKNDLDSVALLHPDGSAVVVVLNQSSKDVPLTIKDPAVGFLETISPGYSIHTYLWRRQ

SEQ ID NO: 1349 - DNA, 1608 bp, synthetic construct
  misc_feature 1..1608: note = Variant of B-Glucocerebrosidase
  source 1..1608: mol_type = other DNA
atggagttttcttctcctagtagagaagaatgccccaagccactgagcagggtgagcatcatggctggatccctcacagggctgcttcttttgcaggcagtctcatgggcctctggagccaggccctgtattcccaagtcattcggctactcctcagtggtgtgtgtatgcaatgccacctattgtgacagtgtcgatcctctcactctccctgctctgggtaccttctcccggtatgagagcacaagaagtggaagacgcatggagctctcaatgggcccttggcaggctaaccgcactgggacaggtctgctgctgaccctccaacctgaacagcagtttcagaaagtcaagggatttggaggagccatgactgatgcagcagcactcaacatcttggccctgtctccaccagcccagaacctgctgttgaagtcctacttctcagaggaggggattgagtacaacatcatccgggttcccatggctagctgtgacttctccattaggacctatacatacgctgacacccccgatgattttcagctccataatttcagtctccctgaagaagacaccaaatggaagatacctctgattcacagagccttgcaactgtcccaaaggccagtgagcctcttcgcttctccctggactagtcctacatggctgaagactaatggtgcttacaatgggaagggctccctgaaaggacagccaggtgacatatatcatcagacatgggcccgctactttgtgaaattccttgatgcctatgcagagcacgggctccaattctgggcagtcaccgcagaaaacgagccctcagctgggctgctgtctggctacccctttcagtgcttgggctttactcctgagcatcaacgggacttcattgcccgggatttggggccaacactggccaacagcacccaccacaatgtaagactcctcattctggatgaccagaggctgctgctccctcattgggccaaggtggtgttgacaaacccagaagctgccaaatatgttcatggcatcgctgtccactggtacctggattttttggcccctgccaagtggactctgggagagacccacagactcttccccaataccacactgtttgcatcagaagcctgcgtggggagcaaattctgggagcagtctgttaggctgggttcctgggatcggggcatgcaatattcccatagtataatagagaacctcctctaccacgtggtaggatggacagactggaatctggctttgaacccagaaggaggccccaattgggtgcgcaactttgttgacagccccatcattgtggatatcacaaaggacaccttctacaaacagcctatgttctatcatctggggcactttagcaagttcattccagagggttccactagagtaggcttggttgcctcacagaagaatgatctggatgctgtggcactcctgcatcctgacgggagtgcagtggtggtagtactgaacaggtctagcaaagatgttcccttgactatcaaagacccagctgtgggctttctggaaaccatttcccctggatactctatccacacctatctctggagaagacag

SEQ ID NO: 1350 - protein, 536 aa, synthetic construct
  REGION 1..536: note = Variant of B-Glucocerebrosidase
MEFSSPSREECPKPLSRVSIMAGSLTGLLLLQAVSWASGARPCIPKSFGYSSVVCVCNATYCDSVDPLTLPALGTFSRYESTRSGRRMELSMGPWQANRTGTGLLLTLQPEQQFQKVKGFGGAMTDAAALNILALSPPAQNLLLKSYFSEEGIEYNIIRVPMASCDFSIRTYTYADTPDDFQLHNFSLPEEDTKWKIPLIHRALQLSQRPVSLFASPWTSPTWLKTNGAYNGKGSLKGQPGDIYHQTWARYFVKFLDAYAEHGLQFWAVTAENEPSAGLLSGYPFQCLGFTPEHQRDFIARDLGPTLANSTHHNVRLLILDDQRLLLPHWAKVVLTNPEAAKYVHGIAVHWYLDFLAPAKWTLGETHRLFPNTTLFASEACVGSKFWEQSVRLGSWDRGMQYSHSIIENLLYHVVGWTDWNLALNPEGGPNWVRNFVDSPIIVDITKDTFYKQPMFYHLGHFSKFIPEGSTRVGLVASQKNDLDAVALLHPDGSAVVVVLNRSSKDVPLTIKDPAVGFLETISPGYSIHTYLWRRQ

SEQ ID NO: 1351 - DNA, 1608 bp, synthetic construct
  misc_feature 1..1608: note = Variant of B-Glucocerebrosidase
  source 1..1608: mol_type = other DNA
atggagttttcttctcctagtagagaagaatgccccaagccactgagcagggtgagcatcatggctggatccctcacagggctgcttcttttgcaggcagtctcatgggcctctggagccaggccctgtattcccaagtcattcggctactcctcagtggtgtgtgtatgcaatgccacctattgtgacagtgtcgatcctctcactctccctgctctgggtaccttctcccggtatgagagcacaagaagtggaagacgcatggagctctcaatgggccctatacaggctaaccgcactgggacaggtctgctgctgaccctccaacctgaacagaagtttcagaaagtcaagggatttggaggagccatgactgatgcagcagcactcaacatcttggccctgtctccaccagcccagaacctgctgttgaagtcctacttctcagaggaggggattgagtacaacatcatccgggttcccatggctagctgtgacttctccattaggacctatacatacgctgacacccccgatgattttcagctccataatttcagtctccctgaagaagacaccaaatggaagatacctctgattcacagagccttgcaactgtcccaaaggccagtgagcctcttcgcttctccctggactagtcctacatggctgaagactaatggtgcttacaatgggaagggctccctgaaaggacagccaggtgacatatatcatcagacatgggcccgctactttgtgaaattccttgatgcctatgcagagcacgggctccaattctgggcagtcaccgcagaaaacgagccctcagctgggctgctgtctggctacccctttcagtgcttgggctttactcctgagcatcaacgggacttcattgcccgggatttggggccaacactggccaacagcacccaccacaatgtaagactcctcattctggatgaccagaggctgctgctccctcattgggccaaggtggtgttgacaaacccagaagctgccaaatatgttcatggcatcgctgtccactggtacctggattttttggcccctgccaagtggactctgggagagacccacagactcttccccaataccacactgtttgcatcagaagcctgcgtggggagcaaattctgggagcagtctgttaggctgggttcctgggatcggggcatgcaatattcccatagtataatagagaacctcctctaccacgtggtaggatggacagactggaatctggctttgaacccagaaggaggccccaattgggtgcgcaactttgttgacagccccatcattgtggatatcacaaaggacaccttctacaaacagcctatgttctatcatctggggcactttagcaagttcattccagagggttccactagagtaggcttggttgcctcacagaagaatgatctggatgctgtggcactcctgcatcctgacgggacagcagtggtggtagtactgaacaggtctagcaaagatgttcccttgactatcaaagacccagctgtgggctttctggaaaccatttcccctggatactctatccacacctatctctggagaagacct

SEQ ID NO: 1352 - protein, 536 aa, synthetic construct
  REGION 1..536: note = Variant of B-Glucocerebrosidase
MEFSSPSREECPKPLSRVSIMAGSLTGLLLLQAVSWASGARPCIPKSFGYSSVVCVCNATYCDSVDPLTLPALGTFSRYESTRSGRRMELSMGPIQANRTGTGLLLTLQPEQKFQKVKGFGGAMTDAAALNILALSPPAQNLLLKSYFSEEGIEYNIIRVPMASCDFSIRTYTYADTPDDFQLHNFSLPEEDTKWKIPLIHRALQLSQRPVSLFASPWTSPTWLKTNGAYNGKGSLKGQPGDIYHQTWARYFVKFLDAYAEHGLQFWAVTAENEPSAGLLSGYPFQCLGFTPEHQRDFIARDLGPTLANSTHHNVRLLILDDQRLLLPHWAKVVLTNPEAAKYVHGIAVHWYLDFLAPAKWTLGETHRLFPNTTLFASEACVGSKFWEQSVRLGSWDRGMQYSHSIIENLLYHVVGWTDWNLALNPEGGPNWVRNFVDSPIIVDITKDTFYKQPMFYHLGHFSKFIPEGSTRVGLVASQKNDLDAVALLHPDGTAVVVVLNRSSKDVPLTIKDPAVGFLETISPGYSIHTYLWRRP

SEQ ID NO: 1353 - DNA, 1608 bp, synthetic construct
  misc_feature 1..1608: note = Variant of B-Glucocerebrosidase
  source 1..1608: mol_type = other DNA
atggagttttcttctcctagtagagaagaatgccccaagccactgagcagggtgagcatcatggctggatccctcacagggctgcttcttttgcaggcagtctcatgggcctctggagccaggccctgtattcccaagtcattcggctactcctcagtggtgtgtgtatgcaatgccacctattgtgacagtgtcgatcctctcactctccctgctctgggtaccttctcccggtatgagagcacaagaagtggaagacgcatggagctctcaatgggcccttggcaggctaactggactgggacaggtctgctgctgaccctccaacctgaacagcagtttcagaaagtcaagggatttggaggagccatgactgatgcagcagcactcaacatcttggccctgtctccaccagcccagaacctgctgttgaagtcctacttctcagaggaggggattgagtacaacatcatccgggttcccatggctagctgtgacttctccattaggacctatacatacgctgacacccccgatgattttgacctcgtgaatttcagtctccctgaagaagacaccaaatggaagatacctctgattcacagagccttgcaactgtcccaaaggccagtgagcctcttcgcttctccctggactagtcctacatggctgaagactaatggtgcttacaatgggaagggctccctgaaaggacagccaggtgacatatatcatcagacatgggcccgctactttgtgaaattccttgatgcctatgcagagcacgggatacaattctgggcagtcaccgcagaaaacgagccctcagctgggctgctgtctggctacccctttcagtgcttgggctttactcctgagcatcaacgggacttcattgcccgggatttggggccaacactggccaacagcacccaccacaatgtaagactcctcattctggatgaccagaggctgctgctccctcattgggccaaggtggtgttgacaaacccagaagctgccaaatatgttcatggcatcgctgtccactggtacctggattttttggcccctgccaagtggactctgggagagacccacagactcttccccaataccacactgtttgcatcagaagcctgcgtggggagcaaaatctgggagcagtctgttaggctgggttcctgggatcggggcatgcaatattcccatagtataatagagaacctcctctaccacgtggtaggatggacagactggaatctggctttgaacccagaaggaggccccaattgggtgcgcaactttgttgacagccccatcattgtggatatcacaaaggacaccttctacaaacagcctatgttctatcatctggggcactttagcaagttcattccagagggttccactagagtaggcttggttgcctcacagaagaatgatctggatgctgtggcactcctgcatcctgacgggagtgcagtggtggtagtactgaacaggtctagcaaagatgttcccttgactatcaaagacccagctgtgggctttctggaaaccatttcccctggatactctatccacacctatctctggagaagacag

SEQ ID NO: 1354 - protein, 536 aa, synthetic construct
  REGION 1..536: note = Variant of B-Glucocerebrosidase
MEFSSPSREECPKPLSRVSIMAGSLTGLLLLQAVSWASGARPCIPKSFGYSSVVCVCNATYCDSVDPLTLPALGTFSRYESTRSGRRMELSMGPWQANWTGTGLLLTLQPEQQFQKVKGFGGAMTDAAALNILALSPPAQNLLLKSYFSEEGIEYNIIRVPMASCDFSIRTYTYADTPDDFDLVNFSLPEEDTKWKIPLIHRALQLSQRPVSLFASPWTSPTWLKTNGAYNGKGSLKGQPGDIYHQTWARYFVKFLDAYAEHGIQFWAVTAENEPSAGLLSGYPFQCLGFTPEHQRDFIARDLGPTLANSTHHNVRLLILDDQRLLLPHWAKVVLTNPEAAKYVHGIAVHWYLDFLAPAKWTLGETHRLFPNTTLFASEACVGSKIWEQSVRLGSWDRGMQYSHSIIENLLYHVVGWTDWNLALNPEGGPNWVRNFVDSPIIVDITKDTFYKQPMFYHLGHFSKFIPEGSTRVGLVASQKNDLDAVALLHPDGSAVVVVLNRSSKDVPLTIKDPAVGFLETISPGYSIHTYLWRRQ

SEQ ID NO: 1355 - DNA, 1608 bp, synthetic construct
  misc_feature 1..1608: note = Variant of B-Glucocerebrosidase
  source 1..1608: mol_type = other DNA
atggagttttcttctcctagtagagaagaatgccccaagccactgagcagggtgagcatcatggctggatccctcacagggctgcttcttttgcaggcagtctcatgggcctctggagccaggccctgtattcccaagtcattcggctactcctcagtggtgtgtgtatgcaatgccacctattgtgacagtgtcgatcctctcactctccctgctctgggtaccttctcccggtatgagagcacaagaagtggaagacgcatggagctctcaatgggccctatacaggctaaccgcactgggacaggtctgctgctgaccctccaacctgaacagaagtttcagaaagtcaagggatttggaggagccatgactgatgcagcagcactcaacatcttggccctgtctccaccagcccagaacctgctgttgaagtcctacttctcagaggaggggattgagtacaacatcatccgggttcccatggctagctgtgacttctccattaggacctatacatacgctgacacccccgatgattttcagctccagaatttcagtctccctgaagaagacaccaaatggaagatacctctgattcacagagccttgcaactgtcccaaaggccagtgagcctcttcgcttctccctggactagtcctacatggctgaagactaatggtgcttacaatgggaagggctccctgaaaggacagccaggtgacatatatcatcagacatgggcccgctactttgtgaaattccttgatgcctatgcagagcacgggctccaattctgggcagtcaccgcagaaaacgagccctcagctgggctgctgtctggctacccctttcagtgcttgggctttactcctgagcatcaacgggacttcattgcccgggatttggggccaacactggccaacagcacccaccacaatgtaagactcctcattctggatgaccagaggctgctgctccctcattgggccaaggtggtgttgacaaacccagaagctgccaaatatgttcatggcatcgctgtccactggtacctggattttttggcccctgccaagtggactctgggagagacccacagactcttccccaataccacactgtttgcatcagaagcctgcgtggggagcaaattctgggagcagtctgttaggctgggttcctgggatcggggcatgcaatattcccatagtataatagagaacctcctctaccacgtggtaggatggacagactggaatctggctttgaacccagaaggaggccccaattgggtgcgcaactttgttgacagccccatcattgtggatatcacaaaggacaccttctacaaacagcctatgttctatcatctggggcactttagcaagttcattccagagggttccactagagtaggcttggttgcctcacagaagaatgatctggatgctgtggcactcctgcatcctgacgggagtgcagtggtggtagtactgaacaggtctagcaaagatgttcccttgactatcaaagacccagctgtgggctttctggaaaccatttcccctggatactctatccacacctatctctggagaagacct

SEQ ID NO: 1356 - protein, 536 aa, synthetic construct
  REGION 1..536: note = Variant of B-Glucocerebrosidase
MEFSSPSREECPKPLSRVSIMAGSLTGLLLLQAVSWASGARPCIPKSFGYSSVVCVCNATYCDSVDPLTLPALGTFSRYESTRSGRRMELSMGPIQANRTGTGLLLTLQPEQKFQKVKGFGGAMTDAAALNILALSPPAQNLLLKSYFSEEGIEYNIIRVPMASCDFSIRTYTYADTPDDFQLQNFSLPEEDTKWKIPLIHRALQLSQRPVSLFASPWTSPTWLKTNGAYNGKGSLKGQPGDIYHQTWARYFVKFLDAYAEHGLQFWAVTAENEPSAGLLSGYPFQCLGFTPEHQRDFIARDLGPTLANSTHHNVRLLILDDQRLLLPHWAKVVLTNPEAAKYVHGIAVHWYLDFLAPAKWTLGETHRLFPNTTLFASEACVGSKFWEQSVRLGSWDRGMQYSHSIIENLLYHVVGWTDWNLALNPEGGPNWVRNFVDSPIIVDITKDTFYKQPMFYHLGHFSKFIPEGSTRVGLVASQKNDLDAVALLHPDGSAVVVVLNRSSKDVPLTIKDPAVGFLETISPGYSIHTYLWRRP

SEQ ID NO: 1357 - DNA, 1608 bp, synthetic construct
  misc_feature 1..1608: note = Variant of B-Glucocerebrosidase
  source 1..1608: mol_type = other DNA
atggagttttcttctcctagtagagaagaatgccccaagccactgagcagggtgagcatcatggctggatccctcacagggctgcttcttttgcaggcagtctcatgggcctctggagccaggccctgtattcccaagtcattcggctactcctcagtggtgtgtgtatgcaatgccacctattgtgacagtgtcgatcctctcactctccctgctctgggtaccttctcccggtatgagagcacaagaagtggaagacgcatggagctctcaatgggcccttggcaggctaaccgcactgggacaggtctgctgctgaccctccaacctgaacagaagtttcagaaagtcaagggatttggaggagccatgactgatgcagcagcactcaacatcttggccctgtctccaccagcccagaacaatctgatgaagtcctacttctcagaggaggggattgagtacaacatcatccgggttcccatggctagctgtgacttctccattaggacctatacatacgctgacacccccgatgattttgggctccagaatttcagtctccctgaagaagacaccaaatggaagatacctctgattcacagagccttgcaactgtcccaaaggccagtgagcctcttcgcttctccctggactagtcctacatggctgaagactaatggtgcttacaatgggaagggctccctgaaaggacagccaggtgacatatatcatcagacatgggcccgctactttgtgaaattccttgatgcctatgcagagcacgggctccaattctgggcagtcaccgcagaaaacgagccctcagctgggctgctgtctggctacccctttcagtgcttgggctttactcctgagcatcaacgggacttcattgcccgggatttggggccaacactggccaacagcacccaccacaatgtaagactcctcattctggatgaccagaggctgctgctccctcattgggccaaggtggtgttgacaaacccagaagctgccaaatatgttcatggcatcgctgtccactggtacctggattttttggcccctgccaagtggactctgggagagacccacagactcttccccaataccacactgtttgcatcagaagcctgcgtggggagcaaaatctgggagcagtctgttaggctgggttcctgggatcggggcatgcaatattcccatagtataatagagaacctcctctaccacgtggtaggatggacagactggaatctggctttgaacccagaaggaggccccaattgggtgcgcaactttgttgacagccccatcattgtggatatcacaaaggacgaattctacaaacagcctatgttctatcatctggggcactttagcaagttcattccagagggttccactagagtaggcttggttgcctcacagaagaatgatctggatgctgtggcactcctgcatcctgacgggagtgcagtggtggtagtactgaacaggtctagcaaagatgttcccttgactatcaaagacccagctgtgggctttctggaaaccatttcccctggatactctatccacacctatctctggagaagacag

SEQ ID NO: 1358 - protein, 536 aa, synthetic construct
  REGION 1..536: note = Variant of B-Glucocerebrosidase
MEFSSPSREECPKPLSRVSIMAGSLTGLLLLQAVSWASGARPCIPKSFGYSSVVCVCNATYCDSVDPLTLPALGTFSRYESTRSGRRMELSMGPWQANRTGTGLLLTLQPEQKFQKVKGFGGAMTDAAALNILALSPPAQNNLMKSYFSEEGIEYNIIRVPMASCDFSIRTYTYADTPDDFGLQNFSLPEEDTKWKIPLIHRALQLSQRPVSLFASPWTSPTWLKTNGAYNGKGSLKGQPGDIYHQTWARYFVKFLDAYAEHGLQFWAVTAENEPSAGLLSGYPFQCLGFTPEHQRDFIARDLGPTLANSTHHNVRLLILDDQRLLLPHWAKVVLTNPEAAKYVHGIAVHWYLDFLAPAKWTLGETHRLFPNTTLFASEACVGSKIWEQSVRLGSWDRGMQYSHSIIENLLYHVVGWTDWNLALNPEGGPNWVRNFVDSPIIVDITKDEFYKQPMFYHLGHFSKFIPEGSTRVGLVASQKNDLDAVALLHPDGSAVVVVLNRSSKDVPLTIKDPAVGFLETISPGYSIHTYLWRRQ

SEQ ID NO: 1359 - DNA, 1608 bp, synthetic construct
  misc_feature 1..1608: note = Variant of B-Glucocerebrosidase
  source 1..1608: mol_type = other DNA
atggagttttcttctcctagtagagaagaatgccccaagccactgagcagggtgagcatcatggctggatccctcacagggctgcttcttttgcaggcagtctcatgggcctctggagccaggccctgtattcccaagtcattcggctactcctcagtggtgtgtgtatgcaatgccacctattgtgacagtgtcgatcctctcactctccctgctctgggtaccttctcccggtatgagagcacaagaagtggaagacgcatggagctctcaatgggccctatacaggctaaccgcactgggacaggtctgctgctgaccctccaacctgaacagaagtttcagaaagtcaagggatttggaggagccatgactgatgcagcagcactcaacatcttggccctgtctccaccagcccagaacctgctgatgaagtcctacttctcagaggaggggattgagtacaacatcatccgggttcccatggctagctgtgacttctccattaggacctatacatacgctgacacccccgatgattttcagctccataatttcagtctccctgaagaagacaccaaatggaagatacctctgattcacagagcccaacaactgtcccaaaggccagtgagcctcttcgcttctccctggactagtcctacatggctgaagactaatggtgcttacaatgggaagggctccctgaaaggacagccaggtgacatatatcatcagacatgggcccgctactttgtgaaattccttgatgcctatgcagagcacgggctccaattctgggcagtcaccgcagaaaacgagccctcagctgggctgctgtctggctacccctttcagtgcttgggctttactcctgagcatcaacgggacttcattgcccgggatttggggccaacactggccaacagcacccaccacaatgtaagactcctcattctggatgaccagaggctgctgctccctcattgggccaaggtggtgttgacaaacccagaagctgccaaatatgttcatggcatcgctgtccactggtacctggattttttggcccctgccaagtggactctgggagagacccacagactcttccccaataccacactgtttgcatcagaagcctgcgtggggagcaaaatctgggagcagtctgttaggctgggttcctgggatcggggcacccaatattcccatagtataatagagaacctcctctaccacgtggtaggatggacagactggaatctggctttgaacccagaaggaggccccaattgggtgcgcaactttgttgacagccccatcattgtggatatcacaaaggacgaattctacaaacagcctatgttctatcatctggggcactttagcaagttcattccagagggttccactagagtaggcttggttgcctcacagaagaatgatctggatgctgtggcactcctgcatcctgacgggagtgcagtggtggtagtactgaacaggtctagcaaagatgttcccttgactatcaaagacccagctgtgggctttctggaaaccatttcccctggatactctatccacacctatctctggagaagacag

SEQ ID NO: 1360 - protein, 536 aa, synthetic construct
  REGION 1..536: note = Variant of B-Glucocerebrosidase
MEFSSPSREECPKPLSRVSIMAGSLTGLLLLQAVSWASGARPCIPKSFGYSSVVCVCNATYCDSVDPLTLPALGTFSRYESTRSGRRMELSMGPIQANRTGTGLLLTLQPEQKFQKVKGFGGAMTDAAALNILALSPPAQNLLMKSYFSEEGIEYNIIRVPMASCDFSIRTYTYADTPDDFQLHNFSLPEEDTKWKIPLIHRAQQLSQRPVSLFASPWTSPTWLKTNGAYNGKGSLKGQPGDIYHQTWARYFVKFLDAYAEHGLQFWAVTAENEPSAGLLSGYPFQCLGFTPEHQRDFIARDLGPTLANSTHHNVRLLILDDQRLLLPHWAKVVLTNPEAAKYVHGIAVHWYLDFLAPAKWTLGETHRLFPNTTLFASEACVGSKIWEQSVRLGSWDRGTQYSHSIIENLLYHVVGWTDWNLALNPEGGPNWVRNFVDSPIIVDITKDEFYKQPMFYHLGHFSKFIPEGSTRVGLVASQKNDLDAVALLHPDGSAVVVVLNRSSKDVPLTIKDPAVGFLETISPGYSIHTYLWRRQ

SEQ ID NO: 1361 - DNA, 1608 bp, synthetic construct
  misc_feature 1..1608: note = Variant of B-Glucocerebrosidase
  source 1..1608: mol_type = other DNA
atggagttttcttctcctagtagagaagaatgccccaagccactgagcagggtgagcatcatggctggatccctcacagggctgcttcttttgcaggcagtctcatgggcctctggagccaggccctgtattcccaagtcattcggctactcctcagtggtgtgtgtatgcaatgccacctattgtgacagtgtcgatcctctcactctccctgctctgggtaccttctcccggtatgagagcacaagaagtggaagacgcatggagctctcaatgggccctatacaggctaaccgcactgggacaggtctgctgctgaccctccaacctgaacagcagtttcagaaagtcaagggatttggaggagccatgactgatgcagcagcactcaacatcttggccctgtctccaccagcccagaacctgctgttgaagtcctacttctcagaggaggggattgagtacaacatcatccgggttcccatggctagctgtgacttctccattaggacctatacatacgctgacacccccgatgattttcagctccataatttcagtctccctgaagaagacaccaaatggaagatacctctgattcacagagccttgcaactgtcccaaaggccagtgagcctcttcgcttctccctggactagtcctacatggctgaagactaatggtgcttacaatgggaagggctccctgaaaggacagccaggtgacatatatcatcagacatgggcccgctactttgtgaaattccttgatgcctatgcagagcacgggctccaattctgggcagtcaccgcagaaaacgagccctcagctgggctgctgtctggctacccctttcagtgcttgggctttactcctgagcatcaacgggacttcattgcccgggatttggggccaacactggccaacagcacccaccacaatgtaagactcctcattctggatgaccagaggctgctgctccctcattgggccaaggtggtgttgacaaacccagaagctgccaaatatgttcatggcatcgctgtccactggtacctggattttttggcccctgccaagtggactctgggagagacccacagactcttccccaataccacactgtttgcatcagaagcctgcgtggggagcaaattctgggagcagtctgttaggctgggttcctgggatcggggcatgcaatattcccatagtataatagagaacctcctctaccacgtggtaggatggacagactggaatctggctttgaacccagaaggaggccccaattgggtgcgcaactttgttgacagccccatcattgtggatatcacaaaggacgaattctacaaacagcctatgttctatcatctggggcactttagcaagttcattccagagggttccactagagtaggcttggttgcctcacagaagaatgatctggatgctgtggcactcctgcatcctgacgggagtgcagtggtggtagtactgaacaggtctagcaaagatgttcccttgactatcaaagacccagctgtgggctttctggaaaccatttcccctggatactctatccacacctatctctggagaagacct

SEQ ID NO: 1362 - protein, 536 aa, synthetic construct
  REGION 1..536: note = Variant of B-Glucocerebrosidase
MEFSSPSREECPKPLSRVSIMAGSLTGLLLLQAVSWASGARPCIPKSFGYSSVVCVCNATYCDSVDPLTLPALGTFSRYESTRSGRRMELSMGPIQANRTGTGLLLTLQPEQQFQKVKGFGGAMTDAAALNILALSPPAQNLLLKSYFSEEGIEYNIIRVPMASCDFSIRTYTYADTPDDFQLHNFSLPEEDTKWKIPLIHRALQLSQRPVSLFASPWTSPTWLKTNGAYNGKGSLKGQPGDIYHQTWARYFVKFLDAYAEHGLQFWAVTAENEPSAGLLSGYPFQCLGFTPEHQRDFIARDLGPTLANSTHHNVRLLILDDQRLLLPHWAKVVLTNPEAAKYVHGIAVHWYLDFLAPAKWTLGETHRLFPNTTLFASEACVGSKFWEQSVRLGSWDRGMQYSHSIIENLLYHVVGWTDWNLALNPEGGPNWVRNFVDSPIIVDITKDEFYKQPMFYHLGHFSKFIPEGSTRVGLVASQKNDLDAVALLHPDGSAVVVVLNRSSKDVPLTIKDPAVGFLETISPGYSIHTYLWRRP

SEQ ID NO: 1363 - DNA, 1608 bp, synthetic construct
  misc_feature 1..1608: note = Variant of B-Glucocerebrosidase
  source 1..1608: mol_type = other DNA
atggagttttcttctcctagtagagaagaatgccccaagccactgagcagggtgagcatcatggctggatccctcacagggctgcttcttttgcaggcagtctcatgggcctctggagccaggccctgtattcccaagtcattcggctactcctcagtggtgtgtgtatgcaatgccacctattgtgacagtgtcgatcctctcactctccctgctctgggtaccttctcccggtatgagagcacaagaagtggaagacgcatggagctctcaatgggccctatacaggctaaccgcactgggacaggtctgctgctgaccctccaacctgaacagaagtttcagaaagtcaagggatttggaggagccatgactgatgcagcagcactcaacatcttggccctgtctccaccagcccagaacctgctgttgaagtcctacttctcagaggaggggattgagtacaacatcatccgggttcccatggctagctgtgacttctccattaggacctatacatacgctgacacccccgatgattttcagctccataatttcagtctccctgaagaagacaccaaatggaagatacctctgattcacagagccttgcaactgtcccaaaggccagtgagcctcttcgcttctccctggactagtcctacatggctgaagactaatggtgcttacaatgggaagggctccctgaaaggacagccaggtgacatatatcatcagacatgggcccgctactttgtgaaattccttgatgcctatgcagagcacgggctccaattctgggcagtcaccgcagaaaacgagccctcagctgggctgctgtctggctacccctttcagtgcttgggctttactcctgagcatcaacgggacttcattgcccgggatttggggccaacactggccaacagcacccaccacaatgtaagactcctcattctggatgaccagaggctgctgctccctcattgggccaaggtggtgttgacaaacccagaagctgccaaatatgttcatggcatcgctgtccactggtacctggattttttggcccctgccaagtggactctgggagagacccacagactcttccccaataccacactgtttgcatcagaagcctgcgtggggagcaaattctgggagcagtctgttaggctgggttcctgggatcggggcatgcaatattcccatagtataatagagaacctcctctaccacgtggtaggatggacagactggaatctggctttgaacccagaaggaggccccaattgggtgcgcaactttgttgacagccccatcattgtggatatcacaaaggacaccttctacaaacagcctatgttctatcatctggggcactttagcaagttcattccagagggttccactagagtaggcttggttgcctcacagaagaatgatctggatgctgtggcactcctgcatcctgacgggagtgcagtggtggtagtactgaacaggtctagcaaagatgttcccttgactatcaaagacccagctgtgggctttctggaaaccatttcccctggatactctatccacacctatctctggagaagacct

SEQ ID NO: 1364 - protein, 536 aa, synthetic construct
  REGION 1..536: note = Variant of B-Glucocerebrosidase
MEFSSPSREECPKPLSRVSIMAGSLTGLLLLQAVSWASGARPCIPKSFGYSSVVCVCNATYCDSVDPLTLPALGTFSRYESTRSGRRMELSMGPIQANRTGTGLLLTLQPEQKFQKVKGFGGAMTDAAALNILALSPPAQNLLLKSYFSEEGIEYNIIRVPMASCDFSIRTYTYADTPDDFQLHNFSLPEEDTKWKIPLIHRALQLSQRPVSLFASPWTSPTWLKTNGAYNGKGSLKGQPGDIYHQTWARYFVKFLDAYAEHGLQFWAVTAENEPSAGLLSGYPFQCLGFTPEHQRDFIARDLGPTLANSTHHNVRLLILDDQRLLLPHWAKVVLTNPEAAKYVHGIAVHWYLDFLAPAKWTLGETHRLFPNTTLFASEACVGSKFWEQSVRLGSWDRGMQYSHSIIENLLYHVVGWTDWNLALNPEGGPNWVRNFVDSPIIVDITKDTFYKQPMFYHLGHFSKFIPEGSTRVGLVASQKNDLDAVALLHPDGSAVVVVLNRSSKDVPLTIKDPAVGFLETISPGYSIHTYLWRRP

SEQ ID NO: 1365 - DNA, 1608 bp, synthetic construct
  misc_feature 1..1608: note = Variant of B-Glucocerebrosidase
  source 1..1608: mol_type = other DNA
atggagttttcttctcctagtagagaagaatgccccaagccactgagcagggtgagcatcatggctggatccctcacagggctgcttcttttgcaggcagtctcatgggcctctggagccaggccctgtattcccaagtcattcggctactcctcagtggtgtgtgtatgcaatgccacctattgtgacagtgtcgatcctctcactctccctgctctgggtaccttctcccggtatgagagcacaagaagtggaagacgcatggagctctcaatgggcccttggcaggctaaccgcactgggacaggtctgctgctgaccctccaacctgaacagaagtttcagaaagtcaagggatttggaggagccatgactgatgcagcagcactcaacatcttggccctgtctccaccagcccagaacctgctgttgaagtcctacttctcagaggaggggattgagtacaacatcatccgggttcccatggctagctgtgacttctccattaggacctatacatacgctgacacccccgatgattttcagctccataatttcagtctccctgaagaagacaccaaatggaagatacctctgattcacagagccttgcaactgtcccaaaggccagtgagcctcttcgcttctccctggactagtcctacatggctgaagactaatggtgcttacaatgggaagggctccctgaaaggacagccaggtgacatatatcatcagacatgggcccgctactttgtgaaattccttgatgcctatgcagagcacgggctccaattctgggcagtcaccgcagaaaacgagccctcagctgggctgctgtctggctacccctttcagtgcttgggctttactcctgagcatcaacgggacttcattgcccgggatttggggccaacactggccaacagcacccaccacaatgtaagactcctcattctggatgaccagaggctgctgctccctcattgggccaaggtggtgttgacaaacccagaagctgccaaatatgttcatggcatcgctgtccactggtacctggattttttggcccctgccaagtggactctgggagagacccacagactcttccccaataccacactgtttgcatcagaagcctgcgtggggagcaaaatctgggagcagtctgttaggctgggttcctgggatcggggcatgcaatattcccatagtataatagagaacctcctctaccacgtggtaggatggacagactggaatctggctttgaacccagaaggaggccccaattgggtgcgcaactttgttgacagccccatcattgtggatatcacaaaggacaccttctacaaacagcctatgttctatcatctggggcactttagcaagttcattccagagggttccactagagtaggcttggttgcctcacagaagaatgatctggatgctgtggcactcctgcatcctgacgggagtgcagtggtggtagtactgaacaggtctagcaaagatgttcccttgactatcaaagacccagctgtgggctttctggaaaccatttcccctggatactctatccacacctatctctggagaagacct

SEQ ID NO: 1366 - protein, 536 aa, synthetic construct
  REGION 1..536: note = Variant of B-Glucocerebrosidase
MEFSSPSREECPKPLSRVSIMAGSLTGLLLLQAVSWASGARPCIPKSFGYSSVVCVCNATYCDSVDPLTLPALGTFSRYESTRSGRRMELSMGPWQANRTGTGLLLTLQPEQKFQKVKGFGGAMTDAAALNILALSPPAQNLLLKSYFSEEGIEYNIIRVPMASCDFSIRTYTYADTPDDFQLHNFSLPEEDTKWKIPLIHRALQLSQRPVSLFASPWTSPTWLKTNGAYNGKGSLKGQPGDIYHQTWARYFVKFLDAYAEHGLQFWAVTAENEPSAGLLSGYPFQCLGFTPEHQRDFIARDLGPTLANSTHHNVRLLILDDQRLLLPHWAKVVLTNPEAAKYVHGIAVHWYLDFLAPAKWTLGETHRLFPNTTLFASEACVGSKIWEQSVRLGSWDRGMQYSHSIIENLLYHVVGWTDWNLALNPEGGPNWVRNFVDSPIIVDITKDTFYKQPMFYHLGHFSKFIPEGSTRVGLVASQKNDLDAVALLHPDGSAVVVVLNRSSKDVPLTIKDPAVGFLETISPGYSIHTYLWRRP

SEQ ID NO: 1367 - DNA, 1608 bp, synthetic construct
  misc_feature 1..1608: note = Variant of B-Glucocerebrosidase
  source 1..1608: mol_type = other DNA
atggagttttcttctcctagtagagaagaatgccccaagccactgagcagggtgagcatcatggctggatccctcacagggctgcttcttttgcaggcagtctcatgggcctctggagccaggccctgtattcccaagtcattcggctactcctcagtggtgtgtgtatgcaatgccacctattgtgacagtgtcgatcctctcactctccctgctctgggtaccttctcccggtatgagagcacaagaagtggaagacgcatggagctctcaatgggccctatacaggctaaccgcactgggacaggtctgctgctgaccctccaacctgaacagaagtttcagaaagtcaagggatttggaggagccatgactgatgcagcagcactcaacatcttggccctgtctccaccagcccagaacctgctgttgaagtcctacttctcagaggaggggattgagtacaacatcatccgggttcccatggctagctgtgacttctccattaggacctatacatacgctgacacccccgatgattttcagctccataatttcagtctccctgaagaagacaccaaatggaagatacctctgattcacagagccttgcaactgtcccaaaggccagtgagcctcttcgcttctccctggactagtcctacatggctgaagactaatggtgcttacaatgggaagggctccctgaaaggacagccaggtgacatatatcatcagacatgggcccgctactttgtgaaattccttgatgcctatgcagagcacgggatacaattctgggcagtcaccgcagaaaacgagccctcagctgggctgctgtctggctacccctttcagtgcttgggctttactcctgagcatcaacgggacttcattgcccgggatttggggccaacactggccaacagcacccaccacaatgtaagactcctcattctggatgaccagaggctgctgctccctcattgggccaaggtggtgttgacaaacccagaagctgccaaatatgttcatggcatcgctgtccactggtacctggattttttggcccctgccaagtggactctgggagagacccacagactcttccccaataccacactgtttgcatcagaagcctgcgtggggagcaaattctgggagcagtctgttaggctgggttcctgggatcggggcatgcaatattcccatagtataatagagaacctcctctaccacgtggtaggatggacagactggaatctggctttgaacccagaaggaggccccaattgggtgcgcaactttgttgacagccccatcattgtggatatcacaaaggacaccttctacaaacagcctatgttctatcatctggggcactttagcaagttcattccagagggttccactagagtaggcttggttgcctcacagaagaatgatctggatgctgtggcactcctgcatcctgacgggagtgcagtggtggtagtactgaacaggtctagcaaagatgttcccttgactatcaaagacccagctgtgggctttctggaaaccatttcccctggatactctatccacacctatctctggagaagacag

SEQ ID NO: 1368 - protein, 536 aa, synthetic construct
  REGION 1..536: note = Variant of B-Glucocerebrosidase
MEFSSPSREECPKPLSRVSIMAGSLTGLLLLQAVSWASGARPCIPKSFGYSSVVCVCNATYCDSVDPLTLPALGTFSRYESTRSGRRMELSMGPIQANRTGTGLLLTLQPEQKFQKVKGFGGAMTDAAALNILALSPPAQNLLLKSYFSEEGIEYNIIRVPMASCDFSIRTYTYADTPDDFQLHNFSLPEEDTKWKIPLIHRALQLSQRPVSLFASPWTSPTWLKTNGAYNGKGSLKGQPGDIYHQTWARYFVKFLDAYAEHGIQFWAVTAENEPSAGLLSGYPFQCLGFTPEHQRDFIARDLGPTLANSTHHNVRLLILDDQRLLLPHWAKVVLTNPEAAKYVHGIAVHWYLDFLAPAKWTLGETHRLFPNTTLFASEACVGSKFWEQSVRLGSWDRGMQYSHSIIENLLYHVVGWTDWNLALNPEGGPNWVRNFVDSPIIVDITKDTFYKQPMFYHLGHFSKFIPEGSTRVGLVASQKNDLDAVALLHPDGSAVVVVLNRSSKDVPLTIKDPAVGFLETISPGYSIHTYLWRRQ

SEQ ID NO: 1369 - DNA, 1608 bp, synthetic construct
  misc_feature 1..1608: note = Variant of B-Glucocerebrosidase
  source 1..1608: mol_type = other DNA
atggagttttcttctcctagtagagaagaatgccccaagccactgagcagggtgagcatcatggctggatccctcacagggctgcttcttttgcaggcagtctcatgggcctctggagccaggccctgtattcccaagtcattcggctactcctcagtggtgtgtgtatgcaatgccacctattgtgacagtgtcgatcctctcactctccctgctctgggtaccttctcccggtatgagagcacaagaagtggaagacgcatggagctctcaatgggccctatccaggctaactggactgggacaggtctgctgctgaccctccaacctgaacagcagtttcagaaagtcaagggatttggaggagccatgactgatgcagcagcactcaacatcttggccctgtctccaccagcccagaacctgctgttgaagtcctacttctcagaggaggggattgagtacaacatcatccgggttcccatggctagctgtgacttctccattaggacctatacatacgctgacacccccgatgattttcagctccataatttcagtctccctgaagaagacaccaaatggaagatacctctgattcacagagccttgcaactgtcccaaaggccagtgagcctcttcgcttctccctggactagtcctacatggctgaagactaatggtgcttacaatgggaagggctccctgaaaggacagccaggtgacatatatcatcagacatgggcccgctactttgtgaaattccttgatgcctatgcagagcacgggctccaattctgggcagtcaccgcagaaaacgagccctcagctgggctgctgtctggctacccctttcagtgcttgggctttactcctgagcatcaacgggacttcattgcccgggatttggggccaacactggccaacagcacccaccacaatgtaagactcctcattctggatgaccagaggctgctgctccctcattgggccaaggtggtgttgacaaacccagaagctgccaaatatgttcatggcatcgctgtccactggtacctggattttttggcccctgccaagtggactctgggagagacccacagactcttccccaataccacactgtttgcatcagaagcctgcgtggggagcaaaatctgggagcagtctgttaggctgggttcctgggatcggggcatgcaatattcccatagtataatagagaacctcctctaccacgtggtaggatggacagactggaatctggctttgaacccagaaggaggccccaattgggtgcgcaactttgttgacagccccatcattgtggatatcacaaaggacgaattctacaaacagcctatgttctatcatctggggcactttagcaagttcattccagagggttccactagagtaggcttggttgcctcacagaagaatgatctggatgctgtggcactcctgcatcctgacgggagtgcagtggtggtagtactgaacaggtctagcaaagatgttcccttgactatcaaagacccagctgtgggctttctggaaaccatttcccctggatactctatccacacctatctctggagaagacag

SEQ ID NO: 1370 - protein, 536 aa, synthetic construct
  REGION 1..536: note = Variant of B-Glucocerebrosidase
MEFSSPSREECPKPLSRVSIMAGSLTGLLLLQAVSWASGARPCIPKSFGYSSVVCVCNATYCDSVDPLTLPALGTFSRYESTRSGRRMELSMGPIQANWTGTGLLLTLQPEQQFQKVKGFGGAMTDAAALNILALSPPAQNLLLKSYFSEEGIEYNIIRVPMASCDFSIRTYTYADTPDDFQLHNFSLPEEDTKWKIPLIHRALQLSQRPVSLFASPWTSPTWLKTNGAYNGKGSLKGQPGDIYHQTWARYFVKFLDAYAEHGLQFWAVTAENEPSAGLLSGYPFQCLGFTPEHQRDFIARDLGPTLANSTHHNVRLLILDDQRLLLPHWAKVVLTNPEAAKYVHGIAVHWYLDFLAPAKWTLGETHRLFPNTTLFASEACVGSKIWEQSVRLGSWDRGMQYSHSIIENLLYHVVGWTDWNLALNPEGGPNWVRNFVDSPIIVDITKDEFYKQPMFYHLGHFSKFIPEGSTRVGLVASQKNDLDAVALLHPDGSAVVVVLNRSSKDVPLTIKDPAVGFLETISPGYSIHTYLWRRQ

SEQ ID NO: 1371 - DNA, 1608 bp, synthetic construct
  misc_feature 1..1608: note = Variant of B-Glucocerebrosidase
  source 1..1608: mol_type = other DNA
atggagttttcttctcctagtagagaagaatgccccaagccactgagcagggtgagcatcatggctggatccctcacagggctgcttcttttgcaggcagtctcatgggcctctggagccaggccctgtattcccaagtcattcggctactcctcagtggtgtgtgtatgcaatgccacctattgtgacagtgtcgatcctctcactctccctgctctgggtaccttctcccggtatgagagcacaagaagtggaagacgcatggagctctcaatgggcccttggcaggctaaccgcactgggacaggtctgctgctgaccctccaacctgaacagaagtttcagaaagtcaagggatttggaggagccatgactgatgcagcagcactcaacatcttggccctgtctccaccagcccagaacctgctgttgaagtcctacttctcagaggaggggattgagtacaacatcatccgggttcccatggctagctgtgacttctccattaggacctatacatacgctgacacccccgatgattttcagctccataatttcagtctccctgaagaagacaccaaatggaagatacctctgattcacagagccttgcaactgtcccaaaggccagtgagcctcttcgcttctccctggactagtcctacatggctgaagactaatggtgcttacaatgggaagggctccctgaaaggacagccaggtgacatatatcatcagacatgggcccgctactttgtgaaattccttgatgcctatgcagagcacgggctccaattctgggcagtcaccgcagaaaacgagccctcagctgggctgctgtctggctacccctttcagtgcttgggctttactcctgagcatcaacgggacttcattgcccgggatttggggccaacactggccaacagcacccaccacaatgtaagactcctcattctggatgaccagaggctgctgctccctcattgggccaaggtggtgttgacaaacccagaagctgccaaatatgttcatggcatcgctgtccactggtacctggattttttggcccctgccaagtggactctgggagagacccacagactcttccccaataccacactgtttgcatcagaagcctgcgtggggagcaaaatctgggagcagtctgttaggctgggttcctgggatcggggcatgcaatattcccatagtataatagagaacctcctctaccacgtggtaggatggacagactggaatctggctttgaacccagaaggaggccccaattgggtgcgcaactttgttgacagccccatcattgtggatatcacaaaggacaccttctacaaacagcctatgttctatcatctggggcactttagcaagttcattccagagggttccactagagtaggcttggttgcctcacagaagaatgatctggatgctgtggcactcctgcatcctgacgggagtgcagtggtggtagtactgaacaggtctagcaaagatgttcccttgactatcaaagacccagctgtgggctttctggaaaccatttcccctggatactctatccacacctatctctggagaagacag

SEQ ID NO: 1372 - protein, 536 aa, synthetic construct
  REGION 1..536: note = Variant of B-Glucocerebrosidase
MEFSSPSREECPKPLSRVSIMAGSLTGLLLLQAVSWASGARPCIPKSFGYSSVVCVCNATYCDSVDPLTLPALGTFSRYESTRSGRRMELSMGPWQANRTGTGLLLTLQPEQKFQKVKGFGGAMTDAAALNILALSPPAQNLLLKSYFSEEGIEYNIIRVPMASCDFSIRTYTYADTPDDFQLHNFSLPEEDTKWKIPLIHRALQLSQRPVSLFASPWTSPTWLKTNGAYNGKGSLKGQPGDIYHQTWARYFVKFLDAYAEHGLQFWAVTAENEPSAGLLSGYPFQCLGFTPEHQRDFIARDLGPTLANSTHHNVRLLILDDQRLLLPHWAKVVLTNPEAAKYVHGIAVHWYLDFLAPAKWTLGETHRLFPNTTLFASEACVGSKIWEQSVRLGSWDRGMQYSHSIIENLLYHVVGWTDWNLALNPEGGPNWVRNFVDSPIIVDITKDTFYKQPMFYHLGHFSKFIPEGSTRVGLVASQKNDLDAVALLHPDGSAVVVVLNRSSKDVPLTIKDPAVGFLETISPGYSIHTYLWRRQ

SEQ ID NO: 1373 - DNA, 1608 bp, synthetic construct
  misc_feature 1..1608: note = Variant of B-Glucocerebrosidase
  source 1..1608: mol_type = other DNA
atggagttttcttctcctagtagagaagaatgccccaagccactgagcagggtgagcatcatggctggatccctcacagggctgcttcttttgcaggcagtctcatgggcctctggagccaggccctgtattcccaagtcattcggctactcctcagtggtgtgtgtatgcaatgccacctattgtgacagtgtcgatcctctcactctccctgctctgggtaccttctcccggtatgagagcacaagaagtggaagacgcatggagctctcaatgggcccttggcaggctaactggactgggacaggtctgctgctgaccctccaacctgaacagaagtttcagaaagtcaagggatttggaggagccatgactgatgcagcagcactcaacatcttggccctgtctccaccagcccagaacctgctgttgaagtcctacttctcagaggaggggattgagtacaacatcatccgggttcccatggctagctgtgacttctccattaggacctatacatacgctgacacccccgatgattttcagctccataatttcagtctccctgaagaagacaccaaatggaagatacctctgattcacagagcccaacaactgtcccaaaggccagtgagcctcttcgcttctccctggactagtcctacatggctgaagactaatggtgcttacaatgggaagggctccctgaaaggacagccaggtgacatatatcatcagacatgggcccgctactttgtgaaattccttgatgcctatgcagagcacgggctccaattctgggcagtcaccgcagaaaacgagccctcagctgggctgctgtctggctacccctttcagtgcttgggctttactcctgagcatcaacgggacttcattgcccgggatttggggccaacactggccaacagcacccaccacaatgtaagactcctcattctggatgaccagaggctgctgctccctcattgggccaaggtggtgttgacaaacccagaagctgccaaatatgttcatggcatcgctgtccactggtacctggattttttggcccctgccaagtggactctgggagagacccacagactcttccccaataccacactgtttgcatcagaagcctgcgtggggagcaaaatctgggagcagtctgttaggctgggttcctgggatcggggcatgcaatattcccatagtataatagagaacctcctctaccacgtggtaggatggacagactggaatctggctttgaacccagaaggaggccccaattgggtgcgcaactttgttgacagccccatcattgtggatatcacaaaggacaccttctacaaacagcctatgttctatcatctggggcactttagcaagttcattccagagggttccactagagtaggcttggttgcctcacagaagaatgatctggatgctgtggcactcctgcatcctgacgggagtgcagtggtggtagtactgaacaggtctagcaaagatgttcccttgactatcaaagacccagctgtgggctttctggaaaccatttcccctggatactctatccacacctatctctggagaagacag

SEQ ID NO: 1374 - protein, 536 aa, synthetic construct
  REGION 1..536: note = Variant of B-Glucocerebrosidase
MEFSSPSREECPKPLSRVSIMAGSLTGLLLLQAVSWASGARPCIPKSFGYSSVVCVCNATYCDSVDPLTLPALGTFSRYESTRSGRRMELSMGPWQANWTGTGLLLTLQPEQKFQKVKGFGGAMTDAAALNILALSPPAQNLLLKSYFSEEGIEYNIIRVPMASCDFSIRTYTYADTPDDFQLHNFSLPEEDTKWKIPLIHRAQQLSQRPVSLFASPWTSPTWLKTNGAYNGKGSLKGQPGDIYHQTWARYFVKFLDAYAEHGLQFWAVTAENEPSAGLLSGYPFQCLGFTPEHQRDFIARDLGPTLANSTHHNVRLLILDDQRLLLPHWAKVVLTNPEAAKYVHGIAVHWYLDFLAPAKWTLGETHRLFPNTTLFASEACVGSKIWEQSVRLGSWDRGMQYSHSIIENLLYHVVGWTDWNLALNPEGGPNWVRNFVDSPIIVDITKDTFYKQPMFYHLGHFSKFIPEGSTRVGLVASQKNDLDAVALLHPDGSAVVVVLNRSSKDVPLTIKDPAVGFLETISPGYSIHTYLWRRQ

SEQ ID NO: 1375 - DNA, 1608 bp, synthetic construct
  misc_feature 1..1608: note = Variant of B-Glucocerebrosidase
  source 1..1608: mol_type = other DNA
atggagttttcttctcctagtagagaagaatgccccaagccactgagcagggtgagcatcatggctggatccctcacagggctgcttcttttgcaggcagtctcatgggcctctggagccaggccctgtattcccaagtcattcggctactcctcagtggtgtgtgtatgcaatgccacctattgtgacagtgtcgatcctctcactctccctgctctgggtaccttctcccggtatgagagcacaagaagtggaagacgcatggagctctcaatgggccctatacaggctaaccgcactgggacaggtctgctgctgaccctccaacctgaacagcagtttcagaaagtcaagggatttggaggagccatgactgatgcagcagcactcaacatcttggccctgtctccaccagcccagaacaatctgctgaagtcctacttctcagaggaggggattgagtacaacatcatccgggttcccatggctagctgtgacttctccattaggacctatacatacgctgacacccccgatgattttcagctccataatttcagtctccctgaagaagacaccaaatggaagatacctctgattcacagagccttgcaactgtcccaaaggccagtgagcctcttcgcttctccctggactagtcctacatggctgaagactaatggtgcttacaatgggaagggctccctgaaaggacagccaggtgacatatatcatcagacatgggcccgctactttgtgaaattccttgatgcctatgcagagcacgggctccaattctgggcagtcaccgcagaaaacgagccctcagctgggctgctgtctggctacccctttcagtgcttgggctttactcctgagcatcaacgggacttcattgcccgggatttggggccaacactggccaacagcacccaccacaatgtaagactcctcattctggatgaccagaggctgctgctccctcattgggccaaggtggtgttgacaaacccagaagctgccaaatatgttcatggcatcgctgtccactggtacctggattttttggcccctgccaagtggactctgggagagacccacagactcttccccaataccacactgtttgcatcagaagcctgcgtggggagcaaaatctgggagcagtctgttaggctgggttcctgggatcggggcatgcaatattcccatagtataatagagaacctcctctaccacgtggtaggatggacagactggaatctggctttgaacccagaaggaggccccaattgggtgcgcaactttgttgacagccccatcattgtggatatcacaaaggacgaattctacaaacagcctatgttctatcatctggggcactttagcaagttcattccagagggttccactagagtaggcttggttgcctcacagaagaatgatctggatgctgtggcactcctgcatcctgacgggagtgcagtggtggtagtactgaacaggtctagcaaagatgttcccttgactatcaaagacccagctgtgggctttctggaaaccatttcccctggatactctatccacacctatctctggagaagacag

SEQ ID NO: 1376 - protein, 536 aa, synthetic construct
  REGION 1..536: note = Variant of B-Glucocerebrosidase
MEFSSPSREECPKPLSRVSIMAGSLTGLLLLQAVSWASGARPCIPKSFGYSSVVCVCNATYCDSVDPLTLPALGTFSRYESTRSGRRMELSMGPIQANRTGTGLLLTLQPEQQFQKVKGFGGAMTDAAALNILALSPPAQNNLLKSYFSEEGIEYNIIRVPMASCDFSIRTYTYADTPDDFQLHNFSLPEEDTKWKIPLIHRALQLSQRPVSLFASPWTSPTWLKTNGAYNGKGSLKGQPGDIYHQTWARYFVKFLDAYAEHGLQFWAVTAENEPSAGLLSGYPFQCLGFTPEHQRDFIARDLGPTLANSTHHNVRLLILDDQRLLLPHWAKVVLTNPEAAKYVHGIAVHWYLDFLAPAKWTLGETHRLFPNTTLFASEACVGSKIWEQSVRLGSWDRGMQYSHSIIENLLYHVVGWTDWNLALNPEGGPNWVRNFVDSPIIVDITKDEFYKQPMFYHLGHFSKFIPEGSTRVGLVASQKNDLDAVALLHPDGSAVVVVLNRSSKDVPLTIKDPAVGFLETISPGYSIHTYLWRRQ

SEQ ID NO: 1377 - DNA, 1608 bp, synthetic construct
  misc_feature 1..1608: note = Variant of B-Glucocerebrosidase
  source 1..1608: mol_type = other DNA
atggagttttcttctcctagtagagaagaatgccccaagccactgagcagggtgagcatcatggctggatccctcacagggctgcttcttttgcaggcagtctcatgggcctctggagccaggccctgtattcccaagtcattcggctactcctcagtggtgtgtgtatgcaatgccacctattgtgacagtgtcgatcctctcactctccctgctctgggtaccttctcccggtatgagagcacaagaagtggaagacgcatggagctctcaatgggccctatacaggctaaccgcactgggacaggtctgctgctgaccctccaacctgaacagaagtttcagaaagtcaagggatttggaggagccatgactgatgcagcagcactcaacatcttggccctgtctccaccagcccagaacctgctgttgaagtcctacttctcagaggaggggattgagtacaacatcatccgggttcccatggctagctgtgacttctccattaggacctatacatacgctgacacccccgatgattttgggctccagaatttcagtctccctgaagaagacaccaaatggaagatacctctgattcacagagccttgcaactgtcccaaaggccagtgagcctcttcgcttctccctggactagtcctacatggctgaagactaatggtgcttacaatgggaagggctccctgaaaggacagccaggtgacatatatcatcagacatgggcccgctactttgtgaaattccttgatgcctatgcagagcacgggatacaattctgggcagtcaccgcagaaaacgagccctcagctgggctgctgtctggctacccctttcagtgcttgggctttactcctgagcatcaacgggacttcattgcccgggatttggggccaacactggccaacagcacccaccacaatgtaagactcctcattctggatgaccagaggctgctgctccctcattgggccaaggtggtgttgacaaacccagaagctgccaaatatgttcatggcatcgctgtccactggtacctggattttttggcccctgccaagtggactctgggagagacccacagactcttccccaataccacactgtttgcatcagaagcctgcgtggggagcaaattctgggagcagtctgttaggctgggttcctgggatcggggcatgcaatattcccatagtataatagagaacctcctctaccacgtggtaggatggacagactggaatctggctttgaacccagaaggaggccccaattgggtgcgcaactttgttgacagccccatcattgtggatatcacaaaggacaccttctacaaacagcctatgttctatcatctggggcactttagcaagttcattccagagggttccactagagtaggcttggttgcctcacagaagaatgatctggatgctgtggcactcctgcatcctgacgggacagcagtggtggtagtactgaacaggtctagcaaagatgttcccttgactatcaaagacccagctgtgggctttctggaaaccatttcccctggatactctatccacacctatctctggagaagacag

SEQ ID NO: 1378 - protein, 536 aa, synthetic construct
  REGION 1..536: note = Variant of B-Glucocerebrosidase
MEFSSPSREECPKPLSRVSIMAGSLTGLLLLQAVSWASGARPCIPKSFGYSSVVCVCNATYCDSVDPLTLPALGTFSRYESTRSGRRMELSMGPIQANRTGTGLLLTLQPEQKFQKVKGFGGAMTDAAALNILALSPPAQNLLLKSYFSEEGIEYNIIRVPMASCDFSIRTYTYADTPDDFGLQNFSLPEEDTKWKIPLIHRALQLSQRPVSLFASPWTSPTWLKTNGAYNGKGSLKGQPGDIYHQTWARYFVKFLDAYAEHGIQFWAVTAENEPSAGLLSGYPFQCLGFTPEHQRDFIARDLGPTLANSTHHNVRLLILDDQRLLLPHWAKVVLTNPEAAKYVHGIAVHWYLDFLAPAKWTLGETHRLFPNTTLFASEACVGSKFWEQSVRLGSWDRGMQYSHSIIENLLYHVVGWTDWNLALNPEGGPNWVRNFVDSPIIVDITKDTFYKQPMFYHLGHFSKFIPEGSTRVGLVASQKNDLDAVALLHPDGTAVVVVLNRSSKDVPLTIKDPAVGFLETISPGYSIHTYLWRRQ

SEQ ID NO: 1379 - DNA, 1608 bp, synthetic construct
  misc_feature 1..1608: note = Variant of B-Glucocerebrosidase
  source 1..1608: mol_type = other DNA
atggagttttcttctcctagtagagaagaatgccccaagccactgagcagggtgagcatcatggctggatccctcacagggctgcttcttttgcaggcagtctcatgggcctctggagccaggccctgtattcccaagtcattcggctactcctcagtggtgtgtgtatgcaatgccacctattgtgacagtgtcgatcctctcactctccctgctctgggtaccttctcccggtatgagagcacaagaagtggaagacgcatggagctctcaatgggccctatacaggctaaccgcactgggacaggtctgctgctgaccctccaacctgaacagcagtttcagaaagtcaagggatttggaggagccatgactgatgcagcagcactcaacatcttggccctgtctccaccagcccagaacaatctgctgaagtcctacttctcagaggaggggattgagtacaacatcatccgggttcccatggctagctgtgacttctccattaggacctatacatacgctgacacccccgatgattttgacctccacaatttcagtctccctgaagaagacaccaaatggaagatacctctgattcacagagccttgcaactgtcccaaaggccagtgagcctcttcgcttctccctggactagtcctacatggctgaagactaatggtgcttacaatgggaagggctccctgaaaggacagccaggtgacatatatcatcagacatgggcccgctactttgtgaaattccttgatgcctatgcagagcacgggctccaattctgggcagtcaccgcagaaaacgagccctcagctgggctgctgtctggctacccctttcagtgcttgggctttactcctgagcatcaacgggacttcattgcccgggatttggggccaacactggccaacagcacccaccacaatgtaagactcctcattctggatgaccagaggctgctgctccctcattgggccaaggtggtgttgacaaacccagaagctgccaaatatgttcatggcatcgctgtccactggtacctggattttttggcccctgccaagtggactctgggagagacccacagactcttccccaataccacactgtttgcatcagaagcctgcgtggggagcaaattctgggagcagtctgttaggctgggttcctgggatcggggcatgcaatattcccatagtataatagagaacctcctctaccacgtggtaggatggacagactggaatctggctttgaacccagaaggaggccccaattgggtgcgcaactttgttgacagccccatcattgtggatatcacaaaggacaccttctacaaacagcctatgttctatcatctggggcactttagcaagttcattccagagggttccactagagtaggcttggttgcctcacagaagaatgatctggatgctgtggcactcctgcatcctgacgggacagcagtggtggtagtactgaacaggtctagcaaagatgttcccttgactatcaaagacccagctgtgggctttctggaaaccatttcccctggatactctatccacacctatctctggagaagacag

SEQ ID NO: 1380 - protein, 536 aa, synthetic construct
  REGION 1..536: note = Variant of B-Glucocerebrosidase
MEFSSPSREECPKPLSRVSIMAGSLTGLLLLQAVSWASGARPCIPKSFGYSSVVCVCNATYCDSVDPLTLPALGTFSRYESTRSGRRMELSMGPIQANRTGTGLLLTLQPEQQFQKVKGFGGAMTDAAALNILALSPPAQNNLLKSYFSEEGIEYNIIRVPMASCDFSIRTYTYADTPDDFDLHNFSLPEEDTKWKIPLIHRALQLSQRPVSLFASPWTSPTWLKTNGAYNGKGSLKGQPGDIYHQTWARYFVKFLDAYAEHGLQFWAVTAENEPSAGLLSGYPFQCLGFTPEHQRDFIARDLGPTLANSTHHNVRLLILDDQRLLLPHWAKVVLTNPEAAKYVHGIAVHWYLDFLAPAKWTLGETHRLFPNTTLFASEACVGSKFWEQSVRLGSWDRGMQYSHSIIENLLYHVVGWTDWNLALNPEGGPNWVRNFVDSPIIVDITKDTFYKQPMFYHLGHFSKFIPEGSTRVGLVASQKNDLDAVALLHPDGTAVVVVLNRSSKDVPLTIKDPAVGFLETISPGYSIHTYLWRRQ

SEQ ID NO: 1381 - DNA, 1608 bp, synthetic construct
  misc_feature 1..1608: note = Variant of B-Glucocerebrosidase
  source 1..1608: mol_type = other DNA
atggagttttcttctcctagtagagaagaatgccccaagccactgagcagggtgagcatcatggctggatccctcacagggctgcttcttttgcaggcagtctcatgggcctctggagccaggccctgtattcccaagtcattcggctactcctcagtggtgtgtgtatgcaatgccacctattgtgacagtgtcgatcctctcactctccctgctctgggtaccttctcccggtatgagagcacaagaagtggaagacgcatggagctctcaatgggccctatacaggctaaccgcactgggacaggtctgctgctgaccctccaacctgaacagcagtttcagaaagtcaagggatttggaggagccatgactgatgcagcagcactcaacatcttggccctgtctccaccagcccagaacctgctgttgaagtcctacttctcagaggaggggattgagtacaacatcatccgggttcccatggctagctgtgacttctccattaggacctatacatacgctgacacccccgatgattttcagctccataatttcagtctccctgaagaagacaccaaatggaagatacctctgattcacagagccttgcaactgtcccaaaggccagtgagcctcttcgcttctccctggactagtcctacatggctgaagactaatggtgcttacaatgggaagggctccctgaaaggacagccaggtgacatatatcatcagacatgggcccgctactttgtgaaattccttgatgcctatgcagagcacgggctccaattctgggcagtcaccgcagaaaacgagccctcagctgggctgctgtctggctacccctttcagtgcttgggctttactcctgagcatcaacgggacttcattgcccgggatttggggccaacactggccaacagcacccaccacaatgtaagactcctcattctggatgaccagaggctgctgctccctcattgggccaaggtggtgttgacaaacccagaagctgccaaatatgttcatggcatcgctgtccactggtacctggattttttggcccctgccaagtggactctgggagagacccacagactcttccccaataccacactgtttgcatcagaagcctgcgtggggagcaaattctgggagcagtctgttaggctgggttcctgggatcggggcatgcaatattcccatagtataatagagaacctcctctaccacgtggtaggatggacagactggaatctggctttgaacccagaaggaggccccaattgggtgcgcaactttgttgacagccccatcattgtggatatcacaaaggacaccttctacaaacagcctatgttctatcatctggggcactttagcaagttcattccagagggttccactagagtaggcttggttgcctcacagaagaatgatctggatgctgtggcactcctgcatcctgacgggagtgcagtggtggtagtactgaacaggtctagcaaagatgttcccttgactatcaaagacccagctgtgggctttctggaaaccatttcccctggatactctatccacacctatctctggagaagacag

SEQ ID NO: 1382 - protein, 536 aa, synthetic construct
  REGION 1..536: note = Variant of B-Glucocerebrosidase
MEFSSPSREECPKPLSRVSIMAGSLTGLLLLQAVSWASGARPCIPKSFGYSSVVCVCNATYCDSVDPLTLPALGTFSRYESTRSGRRMELSMGPIQANRTGTGLLLTLQPEQQFQKVKGFGGAMTDAAALNILALSPPAQNLLLKSYFSEEGIEYNIIRVPMASCDFSIRTYTYADTPDDFQLHNFSLPEEDTKWKIPLIHRALQLSQRPVSLFASPWTSPTWLKTNGAYNGKGSLKGQPGDIYHQTWARYFVKFLDAYAEHGLQFWAVTAENEPSAGLLSGYPFQCLGFTPEHQRDFIARDLGPTLANSTHHNVRLLILDDQRLLLPHWAKVVLTNPEAAKYVHGIAVHWYLDFLAPAKWTLGETHRLFPNTTLFASEACVGSKFWEQSVRLGSWDRGMQYSHSIIENLLYHVVGWTDWNLALNPEGGPNWVRNFVDSPIIVDITKDTFYKQPMFYHLGHFSKFIPEGSTRVGLVASQKNDLDAVALLHPDGSAVVVVLNRSSKDVPLTIKDPAVGFLETISPGYSIHTYLWRRQ

SEQ ID NO: 1383 - DNA, 1608 bp, synthetic construct
  misc_feature 1..1608: note = Variant of B-Glucocerebrosidase
  source 1..1608: mol_type = other DNA
atggagttttcttctcctagtagagaagaatgccccaagccactgagcagggtgagcatcatggctggatccctcacagggctgcttcttttgcaggcagtctcatgggcctctggagccaggccctgtattcccaagtcattcggctactcctcagtggtgtgtgtatgcaatgccacctattgtgacagtgtcgatcctctcactctccctgctctgggtaccttctcccggtatgagagcacaagaagtggaagacgcatggagctctcaatgggccctatccaggctaactggactgggacaggtctgctgctgaccctccaacctgaacagaagtttcagaaagtcaagggatttggaggagccatgactgatgcagcagcactcaacatcttggccctgtctccaccagcccagaacctgctgttgaagtcctacttctcagaggaggggattgagtacaacatcatccgggttcccatggctagctgtgacttctccattaggacctatacatacgctgacacccccgatgattttcagctccataatttcagtctccctgaagaagacaccaaatggaagatacctctgattcacagagccttgcaactgtcccaaaggccagtgagcctcttcgcttctccctggactagtcctacatggctgaagactaatggtgcttacaatgggaagggctccctgaaaggacagccaggtgacatatatcatcagacatgggcccgctactttgtgaaattccttgatgcctatgcagagcacgggatacaattctgggcagtcaccgcagaaaacgagccctcagctgggctgctgtctggctacccctttcagtgcttgggctttactcctgagcatcaacgggacttcattgcccgggatttggggccaacactggccaacagcacccaccacaatgtaagactcctcattctggatgaccagaggctgctgctccctcattgggccaaggtggtgttgacaaacccagaagctgccaaatatgttcatggcatcgctgtccactggtacctggattttttggcccctgccaagtggactctgggagagacccacagactcttccccaataccacactgtttgcatcagaagcctgcgtggggagcaaattctgggagcagtctgttaggctgggttcctgggatcggggcatgcaatattcccatagtataatagagaacctcctctaccacgtggtaggatggacagactggaatctggctttgaacccagaaggaggccccaattgggtgcgcaactttgttgacagccccatcattgtggatatcacaaaggacgaattctacaaacagcctatgttctatcatctggggcactttagcaagttcattccagagggttccactagagtaggcttggttgcctcacagaagaatgatctggatgctgtggcactcctgcatcctgacgggagtgcagtggtggtagtactgaacaggtctagcaaagatgttcccttgactatcaaagacccagctgtgggctttctggaaaccatttcccctggatactctatccacacctatctctggagaagacag

SEQ ID NO: 1384 - protein, 536 aa, synthetic construct
  REGION 1..536: note = Variant of B-Glucocerebrosidase
MEFSSPSREECPKPLSRVSIMAGSLTGLLLLQAVSWASGARPCIPKSFGYSSVVCVCNATYCDSVDPLTLPALGTFSRYESTRSGRRMELSMGPIQANWTGTGLLLTLQPEQKFQKVKGFGGAMTDAAALNILALSPPAQNLLLKSYFSEEGIEYNIIRVPMASCDFSIRTYTYADTPDDFQLHNFSLPEEDTKWKIPLIHRALQLSQRPVSLFASPWTSPTWLKTNGAYNGKGSLKGQPGDIYHQTWARYFVKFLDAYAEHGIQFWAVTAENEPSAGLLSGYPFQCLGFTPEHQRDFIARDLGPTLANSTHHNVRLLILDDQRLLLPHWAKVVLTNPEAAKYVHGIAVHWYLDFLAPAKWTLGETHRLFPNTTLFASEACVGSKFWEQSVRLGSWDRGMQYSHSIIENLLYHVVGWTDWNLALNPEGGPNWVRNFVDSPIIVDITKDEFYKQPMFYHLGHFSKFIPEGSTRVGLVASQKNDLDAVALLHPDGSAVVVVLNRSSKDVPLTIKDPAVGFLETISPGYSIHTYLWRRQ

SEQ ID NO: 1385 - DNA, 1608 bp, synthetic construct
  misc_feature 1..1608: note = Variant of B-Glucocerebrosidase
  source 1..1608: mol_type = other DNA
atggagttttcttctcctagtagagaagaatgccccaagccactgagcagggtgagcatcatggctggatccctcacagggctgcttcttttgcaggcagtctcatgggcctctggagccaggccctgtattcccaagtcattcggctactcctcagtggtgtgtgtatgcaatgccacctattgtgacagtgtcgatcctctcactctccctgctctgggtaccttctcccggtatgagagcacaagaagtggaagacgcatggagctctcaatgggcccttggcaggctaaccgcactgggacaggtctgctgctgaccctccaacctgaacagaagtttcagaaagtcaagggatttggaggagccatgactgatgcagcagcactcaacatcttggccctgtctccaccagcccagaacctgctgttgaagtcctacttctcagaggaggggattgagtacaacatcatccgggttcccatggctagctgtgacttctccattaggacctatacatacgctgacacccccgatgattttcagctccataatttcagtctccctgaagaagacaccaaatggaagatacctctgattcacagagccttgcaactgtcccaaaggccagtgagcctcttcgcttctccctggactagtcctacatggctgaagactaatggtgcttacaatgggaagggctccctgaaaggacagccaggtgacatatatcatcagacatgggcccgctactttgtgaaattccttgatgcctatgcagagcacgggctccaattctgggcagtcaccgcagaaaacgagccctcagctgggctgctgtctggctacccctttcagtgcttgggctttactcctgagcatcaacgggacttcattgcccgggatttggggccaacactggccaacagcacccaccacaatgtaagactcctcattctggatgaccagaggctgctgctccctcattgggccaaggtggtgttgacaaacccagaagctgccaaatatgttcatggcatcgctgtccactggtacctggattttttggcccctgccaagtggactctgggagagacccacagactcttccccaataccacactgtttgcatcagaagcctgcgtggggagcaaattctgggagcagtctgttaggctgggttcctgggatcggggcatgcaatattcccatagtataatagagaacctcctctaccacgtggtaggatggacagactggaatctggctttgaacccagaaggaggccccaattgggtgcgcaactttgttgacagccccatcattgtggatatcacaaaggacaccttctacaaacagcctatgttctatcatctggggcactttagcaagttcattccagagggttccactagagtaggcttggttgcctcacagaagaatgatctggatgctgtggcactcctgcatcctgacgggagtgcagtggtggtagtactgaacaggtctagcaaagatgttcccttgactatcaaagacccagctgtgggctttctggaaaccatttcccctggatactctatccacacctatctctggagaagacag

SEQ ID NO: 1386 - protein, 536 aa, synthetic construct
  REGION 1..536: note = Variant of B-Glucocerebrosidase
MEFSSPSREECPKPLSRVSIMAGSLTGLLLLQAVSWASGARPCIPKSFGYSSVVCVCNATYCDSVDPLTLPALGTFSRYESTRSGRRMELSMGPWQANRTGTGLLLTLQPEQKFQKVKGFGGAMTDAAALNILALSPPAQNLLLKSYFSEEGIEYNIIRVPMASCDFSIRTYTYADTPDDFQLHNFSLPEEDTKWKIPLIHRALQLSQRPVSLFASPWTSPTWLKTNGAYNGKGSLKGQPGDIYHQTWARYFVKFLDAYAEHGLQFWAVTAENEPSAGLLSGYPFQCLGFTPEHQRDFIARDLGPTLANSTHHNVRLLILDDQRLLLPHWAKVVLTNPEAAKYVHGIAVHWYLDFLAPAKWTLGETHRLFPNTTLFASEACVGSKFWEQSVRLGSWDRGMQYSHSIIENLLYHVVGWTDWNLALNPEGGPNWVRNFVDSPIIVDITKDTFYKQPMFYHLGHFSKFIPEGSTRVGLVASQKNDLDAVALLHPDGSAVVVVLNRSSKDVPLTIKDPAVGFLETISPGYSIHTYLWRRQ

SEQ ID NO: 1387 - DNA, 1608 bp, synthetic construct
  misc_feature 1..1608: note = Variant of B-Glucocerebrosidase
  source 1..1608: mol_type = other DNA
atggagttttcttctcctagtagagaagaatgccccaagccactgagcagggtgagcatcatggctggatccctcacagggctgcttcttttgcaggcagtctcatgggcctctggagccaggccctgtattcccaagtcattcggctactcctcagtggtgtgtgtatgcaatgccacctattgtgacagtgtcgatcctctcactctccctgctctgggtaccttctcccggtatgagagcacaagaagtggaagacgcatggagctctcaatgggcccttggcaggctaactggactgggacaggtctgctgctgaccctccaacctgaacagaagtttcagaaagtcaagggatttggaggagccatgactgatgcagcagcactcaacatcttggccctgtctccaccagcccagaacctgctgttgaagtcctacttctcagaggaggggattgagtacaacatcatccgggttcccatggctagctgtgacttctccattaggacctatacatacgctgacacccccgatgattttcagctccataatttcagtctccctgaagaagacaccaaatggaagatacctctgattcacagagccttgcaactgtcccaaaggccagtgagcctcttcgcttctccctggactagtcctacatggctgaagactaatggtgcttacaatgggaagggctccctgaaaggacagccaggtgacatatatcatcagacatgggcccgctactttgtgaaattccttgatgcctatgcagagcacgggctccaattctgggcagtcaccgcagaaaacgagccctcagctgggctgctgtctggctacccctttcagtgcttgggctttactcctgagcatcaacgggacttcattgcccgggatttggggccaacactggccaacagcacccaccacaatgtaagactcctcattctggatgaccagaggctgctgctccctcattgggccaaggtggtgttgacaaacccagaagctgccaaatatgttcatggcatcgctgtccactggtacctggattttttggcccctgccaagtggactctgggagagacccacagactcttccccaataccacactgtttgcatcagaagcctgcgtggggagcaaattctgggagcagtctgttaggctgggttcctgggatcggggcatgcaatattcccatagtataatagagaacctcctctaccacgtggtaggatggacagactggaatctggctttgaacccagaaggaggccccaattgggtgcgcaactttgttgacagccccatcattgtggatatcacaaaggacaccttctacaaacagcctatgttctatcatctggggcactttagcaagttcattccagagggttccactagagtaggcttggttgcctcacagaagaatgatctggatgctgtggcactcctgcatcctgacgggagtgcagtggtggtagtactgaacaggtctagcaaagatgttcccttgactatcaaagacccagctgtgggctttctggaaaccatttcccctggatactctatccacacctatctctggagaagacag

SEQ ID NO: 1388 - protein, 536 aa, synthetic construct
  REGION 1..536: note = Variant of B-Glucocerebrosidase
MEFSSPSREECPKPLSRVSIMAGSLTGLLLLQAVSWASGARPCIPKSFGYSSVVCVCNATYCDSVDPLTLPALGTFSRYESTRSGRRMELSMGPWQANWTGTGLLLTLQPEQKFQKVKGFGGAMTDAAALNILALSPPAQNLLLKSYFSEEGIEYNIIRVPMASCDFSIRTYTYADTPDDFQLHNFSLPEEDTKWKIPLIHRALQLSQRPVSLFASPWTSPTWLKTNGAYNGKGSLKGQPGDIYHQTWARYFVKFLDAYAEHGLQFWAVTAENEPSAGLLSGYPFQCLGFTPEHQRDFIARDLGPTLANSTHHNVRLLILDDQRLLLPHWAKVVLTNPEAAKYVHGIAVHWYLDFLAPAKWTLGETHRLFPNTTLFASEACVGSKFWEQSVRLGSWDRGMQYSHSIIENLLYHVVGWTDWNLALNPEGGPNWVRNFVDSPIIVDITKDTFYKQPMFYHLGHFSKFIPEGSTRVGLVASQKNDLDAVALLHPDGSAVVVVLNRSSKDVPLTIKDPAVGFLETISPGYSIHTYLWRRQ

SEQ ID NO: 1389 - DNA, 1608 bp, synthetic construct
  misc_feature 1..1608: note = Variant of B-Glucocerebrosidase
  source 1..1608: mol_type = other DNA
atggagttttcttctcctagtagagaagaatgccccaagccactgagcagggtgagcatcatggctggatccctcacagggctgcttcttttgcaggcagtctcatgggcctctggagccaggccctgtattcccaagtcattcggctactcctcagtggtgtgtgtatgcaatgccacctattgtgacagtgtcgatcctctcactctccctgctctgggtaccttctcccggtatgagagcacaagaagtggaagacgcatggagctctcaatgggccctatccaggctaactggactgggacaggtctgctgctgaccctccaacctgaacagcagtttcagaaagtcaagggatttggaggagccatgactgatgcagcagcactcaacatcttggccctgtctccaccagcccagaacctgctgttgaagtcctacttctcagaggaggggattgagtacaacatcatccgggttcccatggctagctgtgacttctccattaggacctatacatacgctgacacccccgatgattttcagctccataatttcagtctccctgaagaagacaccaaatggaagatacctctgattcacagagccttgcaactgtcccaaaggccagtgagcctcttcgcttctccctggactagtcctacatggctgaagactaatggtgcttacaatgggaagggctccctgaaaggacagccaggtgacatatatcatcagacatgggcccgctactttgtgaaattccttgatgcctatgcagagcacgggctccaattctgggcagtcaccgcagaaaacgagccctcagctgggctgctgtctggctacccctttcagtgcttgggctttactcctgagcatcaacgggacttcattgcccgggatttggggccaacactggccaacagcacccaccacaatgtaagactcctcattctggatgaccagaggctgctgctccctcattgggccaaggtggtgttgacaaacccagaagctgccaaatatgttcatggcatcgctgtccactggtacctggattttttggcccctgccaagtggactctgggagagacccacagactcttccccaataccacactgtttgcatcagaagcctgcgtggggagcaaattctgggagcagtctgttaggctgggttcctgggatcggggcatgcaatattcccatagtataatagagaacctcctctaccacgtggtaggatggacagactggaatctggctttgaacccagaaggaggccccaattgggtgcgcaactttgttgacagccccatcattgtggatatcacaaaggacgaattctacaaacagcctatgttctatcatctggggcactttagcaagttcattccagagggttccactagagtaggcttggttgcctcacagaagaatgatctggatgctgtggcactcctgcatcctgacgggagtgcagtggtggtagtactgaacaggtctagcaaagatgttcccttgactatcaaagacccagctgtgggctttctggaaaccatttcccctggatactctatccacacctatctctggagaagacag

SEQ ID NO: 1390 - protein, 536 aa, synthetic construct
  REGION 1..536: note = Variant of B-Glucocerebrosidase
MEFSSPSREECPKPLSRVSIMAGSLTGLLLLQAVSWASGARPCIPKSFGYSSVVCVCNATYCDSVDPLTLPALGTFSRYESTRSGRRMELSMGPIQANWTGTGLLLTLQPEQQFQKVKGFGGAMTDAAALNILALSPPAQNLLLKSYFSEEGIEYNIIRVPMASCDFSIRTYTYADTPDDFQLHNFSLPEEDTKWKIPLIHRALQLSQRPVSLFASPWTSPTWLKTNGAYNGKGSLKGQPGDIYHQTWARYFVKFLDAYAEHGLQFWAVTAENEPSAGLLSGYPFQCLGFTPEHQRDFIARDLGPTLANSTHHNVRLLILDDQRLLLPHWAKVVLTNPEAAKYVHGIAVHWYLDFLAPAKWTLGETHRLFPNTTLFASEACVGSKFWEQSVRLGSWDRGMQYSHSIIENLLYHVVGWTDWNLALNPEGGPNWVRNFVDSPIIVDITKDEFYKQPMFYHLGHFSKFIPEGSTRVGLVASQKNDLDAVALLHPDGSAVVVVLNRSSKDVPLTIKDPAVGFLETISPGYSIHTYLWRRQ

SEQ ID NO: 1391 - DNA, 1608 bp, synthetic construct
  misc_feature 1..1608: note = Variant of B-Glucocerebrosidase
  source 1..1608: mol_type = other DNA
atggagttttcttctcctagtagagaagaatgccccaagccactgagcagggtgagcatcatggctggatccctcacagggctgcttcttttgcaggcagtctcatgggcctctggagccaggccctgtattcccaagtcattcggctactcctcagtggtgtgtgtatgcaatgccacctattgtgacagtgtcgatcctctcactctccctgctctgggtaccttctcccggtatgagagcacaagaagtggaagacgcatggagctctcaatgggcccttggcaggctaaccgcactgggacaggtctgctgctgaccctccaacctgaacagcagtttcagaaagtcaagggatttggaggagccatgactgatgcagcagcactcaacatcttggccctgtctccaccagcccagaacctgctgttgaagtcctacttctcagaggaggggattgagtacaacatcatccgggttcccatggctagctgtgacttctccattaggacctatacatacgctgacacccccgatgattttcagctccataatttcagtctccctgaagaagacaccaaatggaagatacctctgattcacagagccttgcaactgtcccaaaggccagtgagcctcttcgcttctccctggactagtcctacatggctgaagactaatggtgcttacaatgggaagggctccctgaaaggacagccaggtgacatatatcatcagacatgggcccgctactttgtgaaattccttgatgcctatgcagagcacgggctccaattctgggcagtcaccgcagaaaacgagccctcagctgggctgctgtctggctacccctttcagtgcttgggctttactcctgagcatcaacgggacttcattgcccgggatttggggccaacactggccaacagcacccaccacaatgtaagactcctcattctggatgaccagaggctgctgctccctcattgggccaaggtggtgttgacaaacccagaagctgccaaatatgttcatggcatcgctgtccactggtacctggattttttggcccctgccaagtggactctgggagagacccacagactcttccccaataccacactgtttgcatcagaagcctgcgtggggagcaaattctgggagcagtctgttaggctgggttcctgggatcggggcatgcaatattcccatagtataatagagaacctcctctaccacgtggtaggatggacagactggaatctggctttgaacccagaaggaggccccaattgggtgcgcaactttgttgacagccccatcattgtggatatcacaaaggacgaattctacaaacagcctatgttctatcatctggggcactttagcaagttcattccagagggttccactagagtaggcttggttgcctcacagaagaatgatctggatgctgtggcactcctgcatcctgacgggagtgcagtggtggtagtactgaacaggtctagcaaagatgttcccttgactatcaaagacccagctgtgggctttctggaaaccatttcccctggatactctatccacacctatctctggagaagacct

SEQ ID NO: 1392 - protein, 536 aa, synthetic construct
  REGION 1..536: note = Variant of B-Glucocerebrosidase
MEFSSPSREECPKPLSRVSIMAGSLTGLLLLQAVSWASGARPCIPKSFGYSSVVCVCNATYCDSVDPLTLPALGTFSRYESTRSGRRMELSMGPWQANRTGTGLLLTLQPEQQFQKVKGFGGAMTDAAALNILALSPPAQNLLLKSYFSEEGIEYNIIRVPMASCDFSIRTYTYADTPDDFQLHNFSLPEEDTKWKIPLIHRALQLSQRPVSLFASPWTSPTWLKTNGAYNGKGSLKGQPGDIYHQTWARYFVKFLDAYAEHGLQFWAVTAENEPSAGLLSGYPFQCLGFTPEHQRDFIARDLGPTLANSTHHNVRLLILDDQRLLLPHWAKVVLTNPEAAKYVHGIAVHWYLDFLAPAKWTLGETHRLFPNTTLFASEACVGSKFWEQSVRLGSWDRGMQYSHSIIENLLYHVVGWTDWNLALNPEGGPNWVRNFVDSPIIVDITKDEFYKQPMFYHLGHFSKFIPEGSTRVGLVASQKNDLDAVALLHPDGSAVVVVLNRSSKDVPLTIKDPAVGFLETISPGYSIHTYLWRRP

SEQ ID NO: 1393 - DNA, 1608 bp, synthetic construct
  misc_feature 1..1608: note = Variant of B-Glucocerebrosidase
  source 1..1608: mol_type = other DNA
atggagttttcttctcctagtagagaagaatgccccaagccactgagcagggtgagcatcatggctggatccctcacagggctgcttcttttgcaggcagtctcatgggcctctggagccaggccctgtattcccaagtcattcggctactcctcagtggtgtgtgtatgcaatgccacctattgtgacagtgtcgatcctctcactctccctgctctgggtaccttctcccggtatgagagcacaagaagtggaagacgcatggagctctcaatgggcccttggcaggctaactggactgggacaggtctgctgctgaccctccaacctgaacagcagtttcagaaagtcaagggatttggaggagccatgactgatgcagcagcactcaacatcttggccctgtctccaccagcccagaacctgctgttgaagtcctacttctcagaggaggggattgagtacaacatcatccgggttcccatggctagctgtgacttctccattaggacctatacatacgctgacacccccgatgattttcagctccataatttcagtctccctgaagaagacaccaaatggaagatacctctgattcacagagccttgcaactgtcccaaaggccagtgagcctcttcgcttctccctggactagtcctacatggctgaagactaatggtgcttacaatgggaagggctccctgaaaggacagccaggtgacatatatcatcagacatgggcccgctactttgtgaaattccttgatgcctatgcagagcacgggctccaattctgggcagtcaccgcagaaaacgagccctcagctgggctgctgtctggctacccctttcagtgcttgggctttactcctgagcatcaacgggacttcattgcccgggatttggggccaacactggccaacagcacccaccacaatgtaagactcctcattctggatgaccagaggctgctgctccctcattgggccaaggtggtgttgacaaacccagaagctgccaaatatgttcatggcatcgctgtccactggtacctggattttttggcccctgccaagtggactctgggagagacccacagactcttccccaataccacactgtttgcatcagaagcctgcgtggggagcaaattctgggagcagtctgttaggctgggttcctgggatcggggcatgcaatattcccatagtataatagagaacctcctctaccacgtggtaggatggacagactggaatctggctttgaacccagaaggaggccccaattgggtgcgcaactttgttgacagccccatcattgtggatatcacaaaggacaccttctacaaacagcctatgttctatcatctggggcactttagcaagttcattccagagggttccactagagtaggcttggttgcctcacagaagaatgatctggatgctgtggcactcctgcatcctgacgggagtgcagtggtggtagtactgaacaggtctagcaaagatgttcccttgactatcaaagacccagctgtgggctttctggaaaccatttcccctggatactctatccacacctatctctggagaagacag

SEQ ID NO: 1394 - protein, 536 aa, synthetic construct
  REGION 1..536: note = Variant of B-Glucocerebrosidase
MEFSSPSREECPKPLSRVSIMAGSLTGLLLLQAVSWASGARPCIPKSFGYSSVVCVCNATYCDSVDPLTLPALGTFSRYESTRSGRRMELSMGPWQANWTGTGLLLTLQPEQQFQKVKGFGGAMTDAAALNILALSPPAQNLLLKSYFSEEGIEYNIIRVPMASCDFSIRTYTYADTPDDFQLHNFSLPEEDTKWKIPLIHRALQLSQRPVSLFASPWTSPTWLKTNGAYNGKGSLKGQPGDIYHQTWARYFVKFLDAYAEHGLQFWAVTAENEPSAGLLSGYPFQCLGFTPEHQRDFIARDLGPTLANSTHHNVRLLILDDQRLLLPHWAKVVLTNPEAAKYVHGIAVHWYLDFLAPAKWTLGETHRLFPNTTLFASEACVGSKFWEQSVRLGSWDRGMQYSHSIIENLLYHVVGWTDWNLALNPEGGPNWVRNFVDSPIIVDITKDTFYKQPMFYHLGHFSKFIPEGSTRVGLVASQKNDLDAVALLHPDGSAVVVVLNRSSKDVPLTIKDPAVGFLETISPGYSIHTYLWRRQ

SEQ ID NO: 1395 - DNA, 1608 bp, synthetic construct
  misc_feature 1..1608: note = Variant of B-Glucocerebrosidase
  source 1..1608: mol_type = other DNA
atggagttttcttctcctagtagagaagaatgccccaagccactgagcagggtgagcatcatggctggatccctcacagggctgcttcttttgcaggcagtctcatgggcctctggagccaggccctgtattcccaagtcattcggctactcctcagtggtgtgtgtatgcaatgccacctattgtgacagtgtcgatcctctcactctccctgctctgggtaccttctcccggtatgagagcacaagaagtggaagacgcatggagctctcaatgggccctatacaggctaaccgcactgggacaggtctgctgctgaccctccaacctgaacagaagtttcagaaagtcaagggatttggaggagccatgactgatgcagcagcactcaacatcttggccctgtctccaccagcccagaacctgctgttgaagtcctacttctcagaggaggggattgagtacaacatcatccgggttcccatggctagctgtgacttctccattaggacctatacatacgctgacacccccgatgattttcagctccataatttcagtctccctgaagaagacaccaaatggaagatacctctgattcacagagccttgcaactgtcccaaaggccagtgagcctcttcgcttctccctggactagtcctacatggctgaagactaatggtgcttacaatgggaagggctccctgaaaggacagccaggtgacatatatcatcagacatgggcccgctactttgtgaaattccttgatgcctatgcagagcacgggctccaattctgggcagtcaccgcagaaaacgagccctcagctgggctgctgtctggctacccctttcagtgcttgggctttactcctgagcatcaacgggacttcattgcccgggatttggggccaacactggccaacagcacccaccacaatgtaagactcctcattctggatgaccagaggctgctgctccctcattgggccaaggtggtgttgacaaacccagaagctgccaaatatgttcatggcatcgctgtccactggtacctggattttttggcccctgccaagtggactctgggagagacccacagactcttccccaataccacactgtttgcatcagaagcctgcgtggggagcaaaatctgggagcagtctgttaggctgggttcctgggatcggggcatgcaatattcccatagtataatagagaacctcctctaccacgtggtaggatggacagactggaatctggctttgaacccagaaggaggccccaattgggtgcgcaactttgttgacagccccatcattgtggatatcacaaaggacaccttctacaaacagcctatgttctatcatctggggcactttagcaagttcattccagagggttccactagagtaggcttggttgcctcacagaagaatgatctggatgctgtggcactcctgcatcctgacgggagtgcagtggtggtagtactgaacaggtctagcaaagatgttcccttgactatcaaagacccagctgtgggctttctggaaaccatttcccctggatactctatccacacctatctctggagaagacct

SEQ ID NO: 1396 - protein, 536 aa, synthetic construct
  REGION 1..536: note = Variant of B-Glucocerebrosidase
MEFSSPSREECPKPLSRVSIMAGSLTGLLLLQAVSWASGARPCIPKSFGYSSVVCVCNATYCDSVDPLTLPALGTFSRYESTRSGRRMELSMGPIQANRTGTGLLLTLQPEQKFQKVKGFGGAMTDAAALNILALSPPAQNLLLKSYFSEEGIEYNIIRVPMASCDFSIRTYTYADTPDDFQLHNFSLPEEDTKWKIPLIHRALQLSQRPVSLFASPWTSPTWLKTNGAYNGKGSLKGQPGDIYHQTWARYFVKFLDAYAEHGLQFWAVTAENEPSAGLLSGYPFQCLGFTPEHQRDFIARDLGPTLANSTHHNVRLLILDDQRLLLPHWAKVVLTNPEAAKYVHGIAVHWYLDFLAPAKWTLGETHRLFPNTTLFASEACVGSKIWEQSVRLGSWDRGMQYSHSIIENLLYHVVGWTDWNLALNPEGGPNWVRNFVDSPIIVDITKDTFYKQPMFYHLGHFSKFIPEGSTRVGLVASQKNDLDAVALLHPDGSAVVVVLNRSSKDVPLTIKDPAVGFLETISPGYSIHTYLWRRP

SEQ ID NO: 1397 - DNA, 1608 bp, synthetic construct
  misc_feature 1..1608: note = Variant of B-Glucocerebrosidase
  source 1..1608: mol_type = other DNA
atggagttttcttctcctagtagagaagaatgccccaagccactgagcagggtgagcatcatggctggatccctcacagggctgcttcttttgcaggcagtctcatgggcctctggagccaggccctgtattcccaagtcattcggctactcctcagtggtgtgtgtatgcaatgccacctattgtgacagtgtcgatcctctcactctccctgctctgggtaccttctcccggtatgagagcacaagaagtggaagacgcatggagctctcaatgggccctatccaggctaactggactgggacaggtctgctgctgaccctccaacctgaacagaagtttcagaaagtcaagggatttggaggagccatgactgatgcagcagcactcaacatcttggccctgtctccaccagcccagaacctgctgttgaagtcctacttctcagaggaggggattgagtacaacatcatccgggttcccatggctagctgtgacttctccattaggacctatacatacgctgacacccccgatgattttgggctccagaatttcagtctccctgaagaagacaccaaatggaagatacctctgattcacagagccttgcaactgtcccaaaggccagtgagcctcttcgcttctccctggactagtcctacatggctgaagactaatggtgcttacaatgggaagggctccctgaaaggacagccaggtgacatatatcatcagacatgggcccgctactttgtgaaattccttgatgcctatgcagagcacgggctccaattctgggcagtcaccgcagaaaacgagccctcagctgggctgctgtctggctacccctttcagtgcttgggctttactcctgagcatcaacgggacttcattgcccgggatttggggccaacactggccaacagcacccaccacaatgtaagactcctcattctggatgaccagaggctgctgctccctcattgggccaaggtggtgttgacaaacccagaagctgccaaatatgttcatggcatcgctgtccactggtacctggattttttggcccctgccaagtggactctgggagagacccacagactcttccccaataccacactgtttgcatcagaagcctgcgtggggagcaaattctgggagcagtctgttaggctgggttcctgggatcggggcatgcaatattcccatagtataatagagaacctcctctaccacgtggtaggatggacagactggaatctggctttgaacccagaaggaggccccaattgggtgcgcaactttgttgacagccccatcattgtggatatcacaaaggacaccttctacaaacagcctatgttctatcatctggggcactttagcaagttcattccagagggttccactagagtaggcttggttgcctcacagaagaatgatctggatgctgtggcactcctgcatcctgacgggagtgcagtggtggtagtactgaacaggtctagcaaagatgttcccttgactatcaaagacccagctgtgggctttctggaaaccatttcccctggatactctatccacacctatctctggagaagacag

SEQ ID NO: 1398 - protein, 536 aa, synthetic construct
  REGION 1..536: note = Variant of B-Glucocerebrosidase
MEFSSPSREECPKPLSRVSIMAGSLTGLLLLQAVSWASGARPCIPKSFGYSSVVCVCNATYCDSVDPLTLPALGTFSRYESTRSGRRMELSMGPIQANWTGTGLLLTLQPEQKFQKVKGFGGAMTDAAALNILALSPPAQNLLLKSYFSEEGIEYNIIRVPMASCDFSIRTYTYADTPDDFGLQNFSLPEEDTKWKIPLIHRALQLSQRPVSLFASPWTSPTWLKTNGAYNGKGSLKGQPGDIYHQTWARYFVKFLDAYAEHGLQFWAVTAENEPSAGLLSGYPFQCLGFTPEHQRDFIARDLGPTLANSTHHNVRLLILDDQRLLLPHWAKVVLTNPEAAKYVHGIAVHWYLDFLAPAKWTLGETHRLFPNTTLFASEACVGSKFWEQSVRLGSWDRGMQYSHSIIENLLYHVVGWTDWNLALNPEGGPNWVRNFVDSPIIVDITKDTFYKQPMFYHLGHFSKFIPEGSTRVGLVASQKNDLDAVALLHPDGSAVVVVLNRSSKDVPLTIKDPAVGFLETISPGYSIHTYLWRRQ

SEQ ID NO: 1399 - DNA, 1608 bp, synthetic construct
  misc_feature 1..1608: note = Variant of B-Glucocerebrosidase
  source 1..1608: mol_type = other DNA
atggagttttcttctcctagtagagaagaatgccccaagccactgagcagggtgagcatcatggctggatccctcacagggctgcttcttttgcaggcagtctcatgggcctctggagccaggccctgtattcccaagtcattcggctactcctcagtggtgtgtgtatgcaatgccacctattgtgacagtgtcgatcctctcactctccctgctctgggtaccttctcccggtatgagagcacaagaagtggaagacgcatggagctctcaatgggccctatacaggctaaccgcactgggacaggtctgctgctgaccctccaacctgaacagaagtttcagaaagtcaagggatttggaggagccatgactgatgcagcagcactcaacatcttggccctgtctccaccagcccagaacaatctgctgaagtcctacttctcagaggaggggattgagtacaacatcatccgggttcccatggctagctgtgacttctccattaggacctatacatacgctgacacccccgatgattttcagctccataatttcagtctccctgaagaagacaccaaatggaagatacctctgattcacagagccttgcaactgtcccaaaggccagtgagcctcttcgcttctccctggactagtcctacatggctgaagactaatggtgcttacaatgggaagggctccctgaaaggacagccaggtgacatatatcatcagacatgggcccgctactttgtgaaattccttgatgcctatgcagagcacgggctccaattctgggcagtcaccgcagaaaacgagccctcagctgggctgctgtctggctacccctttcagtgcttgggctttactcctgagcatcaacgggacttcattgcccgggatttggggccaacactggccaacagcacccaccacaatgtaagactcctcattctggatgaccagaggctgctgctccctcattgggccaaggtggtgttgacaaacccagaagctgccaaatatgttcatggcatcgctgtccactggtacctggattttttggcccctgccaagtggactctgggagagacccacagactcttccccaataccacactgtttgcatcagaagcctgcgtggggagcaaaatctgggagcagtctgttaggctgggttcctgggatcggggcacccaatattcccatagtataatagagaacctcctctaccacgtggtaggatggacagactggaatctggctttgaacccagaaggaggccccaattgggtgcgcaactttgttgacagccccatcattgtggatatcacaaaggacaccttctacaaacagcctatgttctatcatctggggcactttagcaagttcattccagagggttccactagagtaggcttggttgcctcacagaagaatgatctggatgctgtggcactcctgcatcctgacgggagtgcagtggtggtagtactgaacaggtctagcaaagatgttcccttgactatcaaagacccagctgtgggctttctggaaaccatttcccctggatactctatccacacctatctctggagaagacct

SEQ ID NO: 1400 - protein, 536 aa, synthetic construct
  REGION 1..536: note = Variant of B-Glucocerebrosidase
MEFSSPSREECPKPLSRVSIMAGSLTGLLLLQAVSWASGARPCIPKSFGYSSVVCVCNATYCDSVDPLTLPALGTFSRYESTRSGRRMELSMGPIQANRTGTGLLLTLQPEQKFQKVKGFGGAMTDAAALNILALSPPAQNNLLKSYFSEEGIEYNIIRVPMASCDFSIRTYTYADTPDDFQLHNFSLPEEDTKWKIPLIHRALQLSQRPVSLFASPWTSPTWLKTNGAYNGKGSLKGQPGDIYHQTWARYFVKFLDAYAEHGLQFWAVTAENEPSAGLLSGYPFQCLGFTPEHQRDFIARDLGPTLANSTHHNVRLLILDDQRLLLPHWAKVVLTNPEAAKYVHGIAVHWYLDFLAPAKWTLGETHRLFPNTTLFASEACVGSKIWEQSVRLGSWDRGTQYSHSIIENLLYHVVGWTDWNLALNPEGGPNWVRNFVDSPIIVDITKDTFYKQPMFYHLGHFSKFIPEGSTRVGLVASQKNDLDAVALLHPDGSAVVVVLNRSSKDVPLTIKDPAVGFLETISPGYSIHTYLWRRP

SEQ ID NO: 1401 - DNA, 1608 bp, synthetic construct
  misc_feature 1..1608: note = Variant of B-Glucocerebrosidase
  source 1..1608: mol_type = other DNA
atggagttttcttctcctagtagagaagaatgccccaagccactgagcagggtgagcatcatggctggatccctcacagggctgcttcttttgcaggcagtcacatgggcctctggagccaggccctgtattcccaagtcattcggctactcctcagtggtgtgtgtatgcaatgccacctattgtgacagtgtcgatcctctcactctccctgctctgggtaccttctcccggtatgagagcacaagaagtggaagacgcatggagctctcaatgggccctatacaggctaaccgcactgggacaggtctgctgctgaccctccaacctgaacagaagtttcagaaagtcaagggatttggaggagccatgactgatgcagcagcactcaacatcttggccctgtctccaccagcccagaacctgctgttgaagtcctacttctcagaggaggggattgagtacaacatcatccgggttcccatggctagctgtgacttctccattaggacctatacatacgctgacacccccgatgattttcagctccataatttcagtctccctgaagaagacaccaaatggaagatacctctgattcacagagccttgcaactgtcccaaaggccagtgagcctcttcgcttctccctggactagtcctacatggctgaagactaatggtgcttacaatgggaagggctccctgaaaggacagccaggtgacatatatcatcagacatgggcccgctactttgtgaaattccttgatgcctatgcagagcacgggatacaattctgggcagtcaccgcagaaaacgagccctcagctgggctgctgtctggctacccctttcagtgcttgggctttactcctgagcatcaacgggacttcattgcccgggatttggggccaacactggccaacagcacccaccacaatgtaagactcctcattctggatgaccagaggctgctgctccctcattgggccaaggtggtgttgacaaacccagaagctgccaaatatgttcatggcatcgctgtccactggtacctggattttttggcccctgccaagtggactctgggagagacccacagactcttccccaataccacactgtttgcatcagaagcctgcgtggggagcaaattctgggagcagtctgttaggctgggttcctgggatcggggcatgcaatattcccatagtataatagagaacctcctctaccacgtggtaggatggacagactggaatctggctttgaacccagaaggaggccccaattgggtgcgcaactttgttgacagccccatcattgtggatatcacaaaggacgaattctacaaacagcctatgttctatcatctggggcactttagcaagttcattccagagggttccactagagtaggcttggttgcctcacagaagaatgatctggatgctgtggcactcctgcatcctgacgggagtgcagtggtggtagtactgaacaggtctagcaaagatgttcccttgactatcaaagacccagctgtgggctttctggaaaccatttcccctggatactctatccacacctatctctggagaagacct

SEQ ID NO: 1402 - protein, 536 aa, synthetic construct
  REGION 1..536: note = Variant of B-Glucocerebrosidase
MEFSSPSREECPKPLSRVSIMAGSLTGLLLLQAVTWASGARPCIPKSFGYSSVVCVCNATYCDSVDPLTLPALGTFSRYESTRSGRRMELSMGPIQANRTGTGLLLTLQPEQKFQKVKGFGGAMTDAAALNILALSPPAQNLLLKSYFSEEGIEYNIIRVPMASCDFSIRTYTYADTPDDFQLHNFSLPEEDTKWKIPLIHRALQLSQRPVSLFASPWTSPTWLKTNGAYNGKGSLKGQPGDIYHQTWARYFVKFLDAYAEHGIQFWAVTAENEPSAGLLSGYPFQCLGFTPEHQRDFIARDLGPTLANSTHHNVRLLILDDQRLLLPHWAKVVLTNPEAAKYVHGIAVHWYLDFLAPAKWTLGETHRLFPNTTLFASEACVGSKFWEQSVRLGSWDRGMQYSHSIIENLLYHVVGWTDWNLALNPEGGPNWVRNFVDSPIIVDITKDEFYKQPMFYHLGHFSKFIPEGSTRVGLVASQKNDLDAVALLHPDGSAVVVVLNRSSKDVPLTIKDPAVGFLETISPGYSIHTYLWRRP

SEQ ID NO: 1403 - DNA, 1608 bp, synthetic construct
  misc_feature 1..1608: note = Variant of B-Glucocerebrosidase
  source 1..1608: mol_type = other DNA
atggagttttcttctcctagtagagaagaatgccccaagccactgagcagggtgagcatcatggctggatccctcacagggctgcttcttttgcaggcagtctcatgggcctctggagccaggccctgtattcccaagtcattcggctactcctcagtggtgtgtgtatgcaatgccacctattgtgacagtgtcgatcctctcactctccctgctctgggtaccttctcccggtatgagagcacaagaagtggaagacgcatggagctctcaatgggccctatacaggctaaccgcactgggacaggtctgctgctgaccctccaacctgaacagaagtttcagaaagtcaagggatttggaggagccatgactgatgcagcagcactcaacatcttggccctgtctccaccagcccagaacaatctgatgaagtcctacttctcagaggaggggattgagtacaacatcatccgggttcccatggctagctgtgacttctccattaggacctatacatacgctgacacccccgatgattttcagctccataatttcagtctccctgaagaagacaccaaatggaagatacctctgattcacagagccttgcaactgtcccaaaggccagtgagcctcttcgcttctccctggactgctcctacatggctgaagactaatggtgcttacaatgggaagggctccctgaaaggacagccaggtgacatatatcatcagacatgggcccgctactttgtgaaattccttgatgcctatgcagagcacgggctccaattctgggcagtcaccgcagaaaacgagccctcagctgggctgctgtctggctacccctttcagtgcttgggctttactcctgagcatcaacgggacttcattgcccgggatttggggccaacactggccaacagcacccaccacaatgtaagactcctcattctggatgaccagaggctgctgctccctcattgggccaaggtggtgttgacaaacccagaagctgccaaatatgttcatggcatcgctgtccactggtacctggattttttggcccctgccaagtggactctgggagagacccacagactcttccccaataccacactgtttgcatcagaagcctgcgtggggagcaaattctgggagcagtctgttaggctgggttcctgggatcggggcatgcaatattcccatagtataatagagaacctcctctaccacgtggtaggatggacagactggaatctggctttgaacccagaaggaggccccaattgggtgcgcaactttgttgacagccccatcattgtggatatcacaaaggacaccttctacaaacagcctatgttctatcatctggggcactttagcaagttcattccagagggttccactagagtaggcttggttgcctcacagaagaatgatctggatgctgtggcactcctgcatcctgacgggagtgcagtggtggtagtactgaacaggtctagcaaagatgttcccttgactatcaaagacccagctgtgggctttctggaaaccatttcccctggatactctatccacacctatctctggagaagacag

SEQ ID NO: 1404 - protein, 536 aa, synthetic construct
  REGION 1..536: note = Variant of B-Glucocerebrosidase
MEFSSPSREECPKPLSRVSIMAGSLTGLLLLQAVSWASGARPCIPKSFGYSSVVCVCNATYCDSVDPLTLPALGTFSRYESTRSGRRMELSMGPIQANRTGTGLLLTLQPEQKFQKVKGFGGAMTDAAALNILALSPPAQNNLMKSYFSEEGIEYNIIRVPMASCDFSIRTYTYADTPDDFQLHNFSLPEEDTKWKIPLIHRALQLSQRPVSLFASPWTAPTWLKTNGAYNGKGSLKGQPGDIYHQTWARYFVKFLDAYAEHGLQFWAVTAENEPSAGLLSGYPFQCLGFTPEHQRDFIARDLGPTLANSTHHNVRLLILDDQRLLLPHWAKVVLTNPEAAKYVHGIAVHWYLDFLAPAKWTLGETHRLFPNTTLFASEACVGSKFWEQSVRLGSWDRGMQYSHSIIENLLYHVVGWTDWNLALNPEGGPNWVRNFVDSPIIVDITKDTFYKQPMFYHLGHFSKFIPEGSTRVGLVASQKNDLDAVALLHPDGSAVVVVLNRSSKDVPLTIKDPAVGFLETISPGYSIHTYLWRRQ

SEQ ID NO: 1405 - DNA, 1608 bp, synthetic construct
  misc_feature 1..1608: note = Variant of B-Glucocerebrosidase
  source 1..1608: mol_type = other DNA
atggagttttcttctcctagtagagaagaatgccccaagccactgagcagggtgagcatcatggctggatccctcacagggctgcttcttttgcaggcagtctcatgggcctctggagccaggccctgtattcccaagtcattcggctactcctcagtggtgtgtgtatgcaatgccacctattgtgacagtgtcgatcctctcactctccctgctctgggtaccttctcccggtatgagagcacaagaagtggaagacgcatggagctctcaatgggccctatacaggctaactggactgggacaggtctgctgctgaccctccaacctgaacagaagtttcagaaagtcaagggatttggaggagccatgactgatgcagcagcactcaacatcttggccctgtctccaccagcccagaacaatctgctgaagtcctacttctcagaggaggggattgagtacaacatcatccgggttcccatggctagctgtgacttctccattaggacctatacatacgctgacacccccgatgattttcagctccataatttcagtctccctgaagaagacaccaaatggaagatacctctgattcacagagccttgcaactgtcccaaaggccagtgagcctcttcgcttctccctggactagtcctacatggctgaagactaatggtgcttacaatgggaagggctccctgaaaggacagccaggtgacatatatcatcagacatgggcccgctactttgtgaaattccttgatgcctatgcagagcacgggctccaattctgggcagtcaccgcagaaaacgagccctcagctgggctgctgtctggctacccctttcagtgcttgggctttactcctgagcatcaacgggacttcattgcccgggatttggggccaacactggccaacagcacccaccacaatgtaagactcctcattctggatgaccagaggctgctgctccctcattgggccaaggtggtgttgacaaacccagaagctgccaaatatgttcatggcatcgctgtccactggtacctggattttttggcccctgccaagtggactctgggagagacccacagactcttccccaataccacactgtttgcatcagaagcctgcgtggggagcaaattctgggagcagtctgttaggctgggttcctgggatcggggcatgcaatattcccatagtataatagagaacctcctctaccacgtggtaggatggacagactggaatctggctttgaacccagaaggaggccccaattgggtgcgcaactttgttgacagccccatcattgtggatatcacaaaggacaccttctacaaacagcctatgttctatcatctggggcactttagcaagttcattccagagggttccactagagtaggcttggttgcctcacagaagaatgatctggatgctgtggcactcctgcatcctgacgggagtgcagtggtggtagtactgaacaggtctagcaaagatgttcccttgactatcaaagacccagctgtgggctttctggaaaccatttcccctggatactctatccacacctatctctggagaagacag

SEQ ID NO: 1406 - protein, 536 aa, synthetic construct
  REGION 1..536: note = Variant of B-Glucocerebrosidase
MEFSSPSREECPKPLSRVSIMAGSLTGLLLLQAVSWASGARPCIPKSFGYSSVVCVCNATYCDSVDPLTLPALGTFSRYESTRSGRRMELSMGPIQANWTGTGLLLTLQPEQKFQKVKGFGGAMTDAAALNILALSPPAQNNLLKSYFSEEGIEYNIIRVPMASCDFSIRTYTYADTPDDFQLHNFSLPEEDTKWKIPLIHRALQLSQRPVSLFASPWTSPTWLKTNGAYNGKGSLKGQPGDIYHQTWARYFVKFLDAYAEHGLQFWAVTAENEPSAGLLSGYPFQCLGFTPEHQRDFIARDLGPTLANSTHHNVRLLILDDQRLLLPHWAKVVLTNPEAAKYVHGIAVHWYLDFLAPAKWTLGETHRLFPNTTLFASEACVGSKFWEQSVRLGSWDRGMQYSHSIIENLLYHVVGWTDWNLALNPEGGPNWVRNFVDSPIIVDITKDTFYKQPMFYHLGHFSKFIPEGSTRVGLVASQKNDLDAVALLHPDGSAVVVVLNRSSKDVPLTIKDPAVGFLETISPGYSIHTYLWRRQ

SEQ ID NO: 1407 - DNA, 1608 bp, synthetic construct
  misc_feature 1..1608: note = Variant of B-Glucocerebrosidase
  source 1..1608: mol_type = other DNA
atggagttttcttctcctagtagagaagaatgccccaagccactgagcagggtgagcatcatggctggatccctcacagggctgatacttttgcaggcagtctcatgggcctctggagccaggccctgtattcccaagtcattcggctactcctcagtggtgtgtgtatgcaatgccacctattgtgacagtgtcgatcctctcactctccctgctctgggtaccttctcccggtatgagagcacaagaagtggaagacgcatggagctctcaatgggccctatacaggcaaaccgcactggggctggtctgctgctgaccctccaacctgaacagaagtttcagaaagtcaagggatttggaggagccatgactgatgcagcagcactcaacatcttggccctgtctccaccagcccagaacctgctgttgaagtcctacttctcagaggaggggattgagtacaacatcatccgggttcccatggctagctgtgacttctccattaggacctatacatacgctgacacccccgatgattttatgctccataatttcagtctccctgaagaagacaccaaatggaagatacctctgattcacagagccttgcaactgtcccaaaggccagtgagcctcttcgcttctccctggactagtcctacatggctgaagactaatggtgcttacaatgggaagggctccctgaaaggacagccaggtgacatatatcatcagacatgggcccgctactttgtgaaattccttgatgcctatgcagagcacgggctccaattctgggcagtcaccgcagaaaacgagcccacagctgggctgctgtctggctacccctttcagtgcttgggctttactcctgagcatcaacgggacttcattgcccgggatttggggccaacactggccaacagcacccaccacaatgtaagactcctcattctggatgaccagaggctgctgctccctcattgggccaaggtggtgttggagaacccagaagctgccaaatatgttcatggcatcgctgtccactggtacctggattttttggcccctgccaagtggactctgggagagacccacagactcttccccaataccacactgtttgcatcagaagcctgcgtggggagcaaattctgggagcaggccgttaggctgggttcctgggatcggggcatgcaatattcccatagtataatagagaacctcctctaccacgtggtaggatggacagactggaatctggctttgaacccagaaggaggccccaattgggtgcgcaactttgttgacagccccatcattgtggatatcacaaaggacaccttctacaaacagcctatgttctatcatatggggcactttagcaagttcattccagagggttccactagagtaggcttggttgcctcacagaagaatgatctggatgctgtggcactcctgcatcctgacgggagtgcagtggtggtagtactgaacaagtctagcaaagatgttcccttgactatcaaagacccagctgtgggctttctggaaaccatttcccctggatactctatccacacctatgtctggagaagacag

SEQ ID NO: 1408 - protein, 536 aa, synthetic construct
  REGION 1..536: note = Variant of B-Glucocerebrosidase
MEFSSPSREECPKPLSRVSIMAGSLTGLILLQAVSWASGARPCIPKSFGYSSVVCVCNATYCDSVDPLTLPALGTFSRYESTRSGRRMELSMGPIQANRTGAGLLLTLQPEQKFQKVKGFGGAMTDAAALNILALSPPAQNLLLKSYFSEEGIEYNIIRVPMASCDFSIRTYTYADTPDDFMLHNFSLPEEDTKWKIPLIHRALQLSQRPVSLFASPWTSPTWLKTNGAYNGKGSLKGQPGDIYHQTWARYFVKFLDAYAEHGLQFWAVTAENEPTAGLLSGYPFQCLGFTPEHQRDFIARDLGPTLANSTHHNVRLLILDDQRLLLPHWAKVVLENPEAAKYVHGIAVHWYLDFLAPAKWTLGETHRLFPNTTLFASEACVGSKFWEQAVRLGSWDRGMQYSHSIIENLLYHVVGWTDWNLALNPEGGPNWVRNFVDSPIIVDITKDTFYKQPMFYHMGHFSKFIPEGSTRVGLVASQKNDLDAVALLHPDGSAVVVVLNKSSKDVPLTIKDPAVGFLETISPGYSIHTYVWRRQ

SEQ ID NO: 1409 - DNA, 1608 bp, synthetic construct
  misc_feature 1..1608: note = Variant of B-Glucocerebrosidase
  source 1..1608: mol_type = other DNA
atggagttttcttctcctagtagagaagaatgccccaagccactgagcagggtgagcatcatggctggatccctcacagggctgcttcttttgcaggcagtctcatgggcctctggagcccacccctgtattcccaagtcattcggctactcctcagtggtgtgtgtatgcaatgccacctattgtgacagtgtcgatcctctcactctccctgctctgggtaccttctcccggtatgagagcacaagaagtggaagacgcatggagctctcaatgggccctatacaggctaaccgcactgggacaggtctgctgctgaccctccaacctgaacagaagtttcagaaagtcaagggatttggaggagccatgactgatgcagcagcactcaacatcttggccctgtctccaccagcccagaacctgctgttgaagtcctacttctcagaggaggggattgagtacaacatcatccgggttcccatggctagctgtgacttctccattaggacctatacatacgctgacacccccgatgattttcagctccataatttcagtctccctgaagaagacaccaaatggaagatacctctgattcacagagccttgcaactgtcccaaaggccagtgagcctcttcgcttctccctggactagtcctacatggctgaagactaatggtgcttacaatgggaagggctccctgaaaggacagccaggtgacatatatcatcagacatgggcccgctactttgtgaaattccttgatgcctatgcagagcaggggctccaattctgggcagtcaccgcagaaaacgagccctcagctgggctgctgtctggctacccctttcagtgcttgggctttactcctgagcatcaacgggacttcattgcccgggatttggggccaacactggccaacagcacccaccacaatgtaagactcctcattctggatgaccagaggctgctgctccctcattgggccaaggtggtgttggagaacccagaagctgccaaatatgttcatggcatcgctgtccactggtacctggattttttggcccctgccaagtggactctgggagagacccacagactcttccccaataccacactgtttgcatcagaagcctgcgtggggagcaaattctgggagcagtctgttaggctgggttcctgggatcggggcatgcaatattcccatagtataatagagaacctcctctaccacgtggtaggatggacagactggaatctggctttgaacccagaaggaggccccaattgggtgcgcaactttgttgacagccccatcattgtggatatcacaaaggacaccttctacaaacagcctatgttctatcatctggggcactttagcaagttcattccagagggttccactagagtaggcttggttgcctcacagaagaatgatctggatgctgtggcactcctgcatcctgacgggagtgcagtggtggtagtactgaacaagtctagcaaagatgttcccttgactatcaaagacccagctgtgggctttctggaaaccatttcccctggatactctatccacacctatctctggagaagacag

SEQ ID NO: 1410 - protein, 536 aa, synthetic construct
  REGION 1..536: note = Variant of B-Glucocerebrosidase
MEFSSPSREECPKPLSRVSIMAGSLTGLLLLQAVSWASGAHPCIPKSFGYSSVVCVCNATYCDSVDPLTLPALGTFSRYESTRSGRRMELSMGPIQANRTGTGLLLTLQPEQKFQKVKGFGGAMTDAAALNILALSPPAQNLLLKSYFSEEGIEYNIIRVPMASCDFSIRTYTYADTPDDFQLHNFSLPEEDTKWKIPLIHRALQLSQRPVSLFASPWTSPTWLKTNGAYNGKGSLKGQPGDIYHQTWARYFVKFLDAYAEQGLQFWAVTAENEPSAGLLSGYPFQCLGFTPEHQRDFIARDLGPTLANSTHHNVRLLILDDQRLLLPHWAKVVLENPEAAKYVHGIAVHWYLDFLAPAKWTLGETHRLFPNTTLFASEACVGSKFWEQSVRLGSWDRGMQYSHSIIENLLYHVVGWTDWNLALNPEGGPNWVRNFVDSPIIVDITKDTFYKQPMFYHLGHFSKFIPEGSTRVGLVASQKNDLDAVALLHPDGSAVVVVLNKSSKDVPLTIKDPAVGFLETISPGYSIHTYLWRRQ

SEQ ID NO: 1411 - DNA, 1608 bp, synthetic construct
  misc_feature 1..1608: note = Variant of B-Glucocerebrosidase
  source 1..1608: mol_type = other DNA
atggagttttcttctcctagtagagaagaatgccccaagccactgagcagggtgagcatcatggctggatccctcacagggctgatacttttgcaggcagtctcatgggcctctggagccaggccctgtattcccaagtcattcggctactcctcagtggtgtgtgtatgcaatgccacctattgtgacagtgtcgatcctctcactctccctgctctgggtaccttctcccggtatgagagcacaagaagtggaagacgcatggagctctcaatgggccctatacagaggaaccgcactgggaccggtctgctgctgaccctccaacctgaacagaagtttcagaaagtcaagggatttggaggagccatgactgatgcagcagcactcaacatcttggccctgtctccaccagcccagaacctgctgttgaagtcctacttctcaaccgaggggattgagtacaacatcatccgggttcccatggctagctgtgacttctccattaggacctatacatacgctgacacccccgatgattttcagctccataatttcagtctccctgaagaagacaccaaatggaagatacctctgattcacagagccttgcaactgtcccaaaggccagtgagcctcttcgcttctccctggactagtcctacatggctgaagactaatggtgcttacaatgggaagggctccctgaaaggacagccaggtgacatatatcatcagacatgggcccgctactttgtgaaattccttgatgcctatgcagagcaggggctccaattctgggcagtcaccgcagaaaacgagccctcagctgggctgctgtctggctacccctttcagtgcttgggctttactcctgagcatcaacgggacttcattgcccgggatttggggccaacactggccaacagcacccaccacaatgtaagactcctcattctggatgaccagaggctgctgctccctcattgggccaaggtggtgttggagaacccagaagctgccaaatatgttcatggcatcgctgtccactggtacctggattttttggcccctgccaagtggactctgggagagacccacagactcttccccaataccacactgtttgcatcagaagcctgcgtggggagcaaattctgggagcagtctgttaggctgggttcctgggatcggggcatgcaatattcccatagtataatagagaacctcctctaccacgtggtaggatggacagactggaatctggctttgaacccagaaggaggccccaattgggtgcgcaactttgttgacagccccatcattgtggatatcacaaaggacaccttctacaaacagcctatgttctatcatctggggcactttagcaagttcattccagagggttccactagagtaggcttggttgcctcacagaagaatgatctggatgctgtggcactcctgcatcctgacgggagtgcagtggtggtagtactgaacaagtctagcaaagatgttcccttgactatcaaagacccagctgtgggctttctggaaaccatttcccctggatactctatccacacctatgtctggagaagacag

SEQ ID NO: 1412 - protein, 536 aa, synthetic construct
  REGION 1..536: note = Variant of B-Glucocerebrosidase
MEFSSPSREECPKPLSRVSIMAGSLTGLILLQAVSWASGARPCIPKSFGYSSVVCVCNATYCDSVDPLTLPALGTFSRYESTRSGRRMELSMGPIQRNRTGTGLLLTLQPEQKFQKVKGFGGAMTDAAALNILALSPPAQNLLLKSYFSTEGIEYNIIRVPMASCDFSIRTYTYADTPDDFQLHNFSLPEEDTKWKIPLIHRALQLSQRPVSLFASPWTSPTWLKTNGAYNGKGSLKGQPGDIYHQTWARYFVKFLDAYAEQGLQFWAVTAENEPSAGLLSGYPFQCLGFTPEHQRDFIARDLGPTLANSTHHNVRLLILDDQRLLLPHWAKVVLENPEAAKYVHGIAVHWYLDFLAPAKWTLGETHRLFPNTTLFASEACVGSKFWEQSVRLGSWDRGMQYSHSIIENLLYHVVGWTDWNLALNPEGGPNWVRNFVDSPIIVDITKDTFYKQPMFYHLGHFSKFIPEGSTRVGLVASQKNDLDAVALLHPDGSAVVVVLNKSSKDVPLTIKDPAVGFLETISPGYSIHTYVWRRQ

SEQ ID NO: 1413 - DNA, 1608 bp, synthetic construct
  misc_feature 1..1608: note = Variant of B-Glucocerebrosidase
  source 1..1608: mol_type = other DNA
atggagttttcttctcctagtagagaagaatgccccaagccactgagcagggtgagcatcatggctggatccctcacagggctgatacttttgcaggcagtctcatgggcctctggagccaggccctgtattcccaagtcattcggctactcctcagtggtgtgtgtatgcaatgccacctattgtgacagtgtcgatcctctcactctccctgctctgggtaccttctcccggtatgagagcacaagaagtggaagacgcatggagctctcaatgggccctatacaggctaaccgcactgggacaggtctgctgctgaccctccaacctgaacagaagtttcagaaagtcaagggatttggaggagccatgactgatgcagcagcactcaacatcttggccctgtctccaccagcccagaacctgctgttgaagtcctacttctcagaggaggggattgagtacaacatcatccgggttcccatggctagctgtgacttctccattaggacctatacatacgctgacacccccgatgattttcagctccataatttcagtctccctgaagaagacaccaaatggaagatacctctgattcacagagccttgcaactgtcccaaaggccagtgagcctcttcgcttctccctggactagtcctacatggctgaagactaatggtgcttacaatgggaagggctccctgaaaggacagccaggtgacatatatcatcagacatgggcccgctactttgtgaaattccttgatgcctatgcagagcacgggctccaattctgggcagtcaccgcagaaaacgagccctcagctgggctgctgtctggctacccctttcagtgcttgggctttactcctgagcatcaacgggacttcattgcccgggatttggggccaacactggccaacagcacccaccacaatgtaagactcctcattctggatgaccagaggctgctgctccctcattgggccaaggtggtgttgacaaacccagaagctgccaaatatgttcatggcatcgctgtccactggtacctggattttttggcccctgccaagtggactctgggagagacccacagactcttccccaataccacactgtttgcatcagaagcctgcgtggggagcaaattctgggagcagtctgttaggctgggttcctgggatcggggcatgcaatattcccatagtataatagagaacctcctctaccacgtggtaggatggacagactggaatctggctttgaacccagaaggaggccccaattgggtgcgcaactttgttgacagccccatcattgtggatatcacaaaggacaccttctacaaacagcctatgttctatcatctggggcactttagcaagttcattccagagggttccactagagtaggcttggttgcctcacagaagaatgatctggatgctgtggcactcctgcatcctgacgggagtgcagtggtggtagtactgaacaggtctagcaaagatgttcccttgactatcaaagacccagctgtgggctttctggaaaccatttcccctggatactctatccacacctatctctggagaagacag

SEQ ID NO: 1414 - protein, 536 aa, synthetic construct
  REGION 1..536: note = Variant of B-Glucocerebrosidase
MEFSSPSREECPKPLSRVSIMAGSLTGLILLQAVSWASGARPCIPKSFGYSSVVCVCNATYCDSVDPLTLPALGTFSRYESTRSGRRMELSMGPIQANRTGTGLLLTLQPEQKFQKVKGFGGAMTDAAALNILALSPPAQNLLLKSYFSEEGIEYNIIRVPMASCDFSIRTYTYADTPDDFQLHNFSLPEEDTKWKIPLIHRALQLSQRPVSLFASPWTSPTWLKTNGAYNGKGSLKGQPGDIYHQTWARYFVKFLDAYAEHGLQFWAVTAENEPSAGLLSGYPFQCLGFTPEHQRDFIARDLGPTLANSTHHNVRLLILDDQRLLLPHWAKVVLTNPEAAKYVHGIAVHWYLDFLAPAKWTLGETHRLFPNTTLFASEACVGSKFWEQSVRLGSWDRGMQYSHSIIENLLYHVVGWTDWNLALNPEGGPNWVRNFVDSPIIVDITKDTFYKQPMFYHLGHFSKFIPEGSTRVGLVASQKNDLDAVALLHPDGSAVVVVLNRSSKDVPLTIKDPAVGFLETISPGYSIHTYLWRRQ

SEQ ID NO: 1415 - DNA, 1608 bp, synthetic construct
  misc_feature 1..1608: note = Variant of B-Glucocerebrosidase
  source 1..1608: mol_type = other DNA
atggagttttcttctcctagtagagaagaatgccccaagccactgagcagggtgagcatcatggctggatccctcacagggctgcttcttttgcaggcagtctcatgggcctctggagccaggccctgtattcccaagtcattcggctactcctcagtggtgtgtgtatgcaatgccacctattgtgacagtgtcgatcctctcactctccctgctctgggtaccttctcccggtatgagagcacaagaagtggaagacgcatggagctctcaatgggccctatacaggctaaccgcactgggacaggtctgctgctgaccctccaacctgaacagaagtttcagaaagtcaagggatttggaggagccatgactgatgcagcagcactcaacatcttggccctgtctccaccagcccagaacctgctgttgaagtcctacttctcagaggaggggattgagtacaacatcatccgggttcccatggctagctgtgacttctccattaggacctatacatacgctgacacccccgatgattttcagctccataatttcagtctccctgaagaagacaccaaatggaagatacctctgattcacagagccttgcaactgtcccaaaggccagtgagcctcttcgcttctccctggactagtcctacatggctgaagactaatggtgcttacaatgggaagggctccctgaaaggacagccaggtgacatatatcatcagacatgggcccgctactttgtgaaattccttgatgcctatgcagagcacgggctccaattctgggcagtcaccgcagaaaacgagccctcagctgggctgctgtctggctacccctttcagtgcttgggctttactcctgagcatcaacgggacttcattgcccgggatttggggccaacactggccaacagcacccaccacaatgtaagactcctcattctggatgaccagaggctgctgctccctcattgggccaaggtggtgttgacaaacccagaagctgccaaatatgttcatggcatcgctgtccactggtacctggattttttggcccctgccaagtggactctgggagagacccacagactcttccccaataccacactgtttgcatcagaagcctgcgtggggagcaaattctgggagcagtctgttaggctgggttcctgggatcggggcatgcaatattcccatagtataatagagaacctcctctaccacgtggtaggatggacagactggaatctggctttgaacccagaaggaggccccaattgggtgcgcaactttgttgacagccccatcattgtggatatcacaaaggacaccttctacaaacagcctatgttctatcatctggggcactttagcaagttcattccagagggttccactagagtaggcttggttgcctcacagaagaatgatctggatgctgtggcactcctgcatcctgacgggagtgcagtggtggtagtactgaacaggtctagcaaagatgttcccttgactatcaaagacccagctgtgggctttctggaaaccatttcccctggatactctatccacacctatgtctggagaagacag

SEQ ID NO: 1416 - protein, 536 aa, synthetic construct
  REGION 1..536: note = Variant of B-Glucocerebrosidase
MEFSSPSREECPKPLSRVSIMAGSLTGLLLLQAVSWASGARPCIPKSFGYSSVVCVCNATYCDSVDPLTLPALGTFSRYESTRSGRRMELSMGPIQANRTGTGLLLTLQPEQKFQKVKGFGGAMTDAAALNILALSPPAQNLLLKSYFSEEGIEYNIIRVPMASCDFSIRTYTYADTPDDFQLHNFSLPEEDTKWKIPLIHRALQLSQRPVSLFASPWTSPTWLKTNGAYNGKGSLKGQPGDIYHQTWARYFVKFLDAYAEHGLQFWAVTAENEPSAGLLSGYPFQCLGFTPEHQRDFIARDLGPTLANSTHHNVRLLILDDQRLLLPHWAKVVLTNPEAAKYVHGIAVHWYLDFLAPAKWTLGETHRLFPNTTLFASEACVGSKFWEQSVRLGSWDRGMQYSHSIIENLLYHVVGWTDWNLALNPEGGPNWVRNFVDSPIIVDITKDTFYKQPMFYHLGHFSKFIPEGSTRVGLVASQKNDLDAVALLHPDGSAVVVVLNRSSKDVPLTIKDPAVGFLETISPGYSIHTYVWRRQ

SEQ ID NO: 1417 - DNA, 1608 bp, synthetic construct
  misc_feature 1..1608: note = Variant of B-Glucocerebrosidase
  source 1..1608: mol_type = other DNA
atggagttttcttctcctagtagagaagaatgccccaagccactgagcagggtgagcatcatggctggatccctcacagggctgcttcttttgcaggcagtctcatgggcctctggagccaggccctgtattcccaagtcattcggctactcctcagtggtgtgtgtatgcaatgccacctattgtgacagtgtcgatcctctcactctccctgctctgggtaccttctcccggtatgagagcacaagaagtggaagacgcatggagctctcaatgggccctatacaggctaaccgcactggggctggtctgctgctgaccctccaacctgaacagaagtttcagaaagtcaagggatttggaggagccatgactgatgcagcagcactcaacatcttggccctgtctccaccagcccagaacctgctgttgaagtcctacttctcagaggaggggattgagtacaacatcatccgggttcccatggctagctgtgacttctccattaggacctatacatacgctgacacccccgatgattttcagctccataatttcagtctccctgaagaagacaccaaatggaagatacctctgattcacagagccttgcaactgtcccaaaggccagtgagcctcttcgcttctccctggactagtcctacatggctgaagactaatggtgcttacaatgggaagggctccctgaaaggacagccaggtgacatatatcatcagacatgggcccgctactttgtgaaattccttgatgcctatgcagagcacgggctccaattctgggcagtcaccgcagaaaacgagccctcagctgggctgctgtctggctacccctttcagtgcttgggctttactcctgagcatcaacgggacttcattgcccgggatttggggccaacactggccaacagcacccaccacaatgtaagactcctcattctggatgaccagaggctgctgctccctcattgggccaaggtggtgttgacaaacccagaagctgccaaatatgttcatggcatcgctgtccactggtacctggattttttggcccctgccaagtggactctgggagagacccacagactcttccccaataccacactgtttgcatcagaagcctgcgtggggagcaaattctgggagcaggccgttaggctgggttcctgggatcggggcatgcaatattcccatagtataatagagaacctcctctaccacgtggtaggatggacagactggaatctggctttgaacccagaaggaggccccaattgggtgcgcaactttgttgacagccccatcattgtggatatcacaaaggacaccttctacaaacagcctatgttctatcatatggggcactttagcaagttcattccagagggttccactagagtaggcttggttgcctcacagaagaatgatctggatgctgtggcactcctgcatcctgacgggagtgcagtggtggtagtactgaacaagtctagcaaagatgttcccttgactatcaaagacccagctgtgggctttctggaaaccatttcccctggatactctatccacacctatgtctggagaagacag

SEQ ID NO: 1418 - protein, 536 aa, synthetic construct
  REGION 1..536: note = Variant of B-Glucocerebrosidase
MEFSSPSREECPKPLSRVSIMAGSLTGLLLLQAVSWASGARPCIPKSFGYSSVVCVCNATYCDSVDPLTLPALGTFSRYESTRSGRRMELSMGPIQANRTGAGLLLTLQPEQKFQKVKGFGGAMTDAAALNILALSPPAQNLLLKSYFSEEGIEYNIIRVPMASCDFSIRTYTYADTPDDFQLHNFSLPEEDTKWKIPLIHRALQLSQRPVSLFASPWTSPTWLKTNGAYNGKGSLKGQPGDIYHQTWARYFVKFLDAYAEHGLQFWAVTAENEPSAGLLSGYPFQCLGFTPEHQRDFIARDLGPTLANSTHHNVRLLILDDQRLLLPHWAKVVLTNPEAAKYVHGIAVHWYLDFLAPAKWTLGETHRLFPNTTLFASEACVGSKFWEQAVRLGSWDRGMQYSHSIIENLLYHVVGWTDWNLALNPEGGPNWVRNFVDSPIIVDITKDTFYKQPMFYHMGHFSKFIPEGSTRVGLVASQKNDLDAVALLHPDGSAVVVVLNKSSKDVPLTIKDPAVGFLETISPGYSIHTYVWRRQ

SEQ ID NO: 1419 - DNA, 1608 bp, synthetic construct
  misc_feature 1..1608: note = Variant of B-Glucocerebrosidase
  source 1..1608: mol_type = other DNA
atggagttttcttctcctagtagagaagaatgccccaagccactgagcagggtgagcatcatggctggatccctcacagggctgatacttttgcaggcagtctcatgggcctctggagccaggccctgtattcccaagtcattcggctactcctcagtggtgtgtgtatgcaatgccacctattgtgacagtgtcgatcctctcactctccctgctctgggtaccttctcccggtatgagagcacaagaagtggaagacgcatggagctctcaatgggccctatacaggctaaccgcactgggacaggtctgctgctgaccctccaacctgaacagaagtttcagaaagtcaagggatttggaggagccatgactgatgcagcagcactcaacatcttggccctgtctccaccagcccagaacctgctgttgaagtcctacttctcagaggaggggattgagtacaacatcatccgggttcccatggctagctgtgacttctccattaggacctatacatacgctgacacccccgatgattttcagctccataatttcagtctccctgaagaagacaccaaatggaagatacctctgattcacagagccttgcaactgtcccaaaggccagtgagcctcttcgcttctccctggactagtcctacatggctgaagactaatggtgcttacaatgggaagggctccctgaaaggacagccaggtgacatatatcatcagacatgggcccgctactttgtgaaattccttgatgcctatgcagagcaggggctccaattctgggcagtcaccgcagaaaacgagcccacagctgggctgctgtctggctacccctttcagtgcttgggctttactcctgagcatcaacgggacttcattgcccgggatttggggccaacactggccaacagcacccaccacaatgtaagactcctcattctggatgaccagaggctgctgctccctcattgggccaaggtggtgttggagaacccagaagctgccaaatatgttcatggcatcgctgtccactggtacctggattttttggcccctgccaagtggactctgggagagacccacagactcttccccaataccacactgtttgcatcagaagcctgcgtggggagcaaattctgggagcagtctgttaggctgggttcctgggatcggggcatgcaatattcccatagtataatagagaacctcctctaccacgtggtaggatggacagactggaatctggctttgaacccagaaggaggccccaattgggtgcgcaactttgttgacagccccatcattgtggatatcacaaaggacaccttctacaaacagcctatgttctatcatctggggcactttagcaagttcattccagagggttccactagagtaggcttggttgcctcacagaagaatgatctggatgctgtggcactcctgcatcctgacgggagtggagtggtggtagtactgaacaggtctagcaaagatgttcccttgactatcaaagacccagctgtgggctttctggaaaccatttcccctggatactctatccacacctatctctggagaagacag

SEQ ID NO: 1420 - protein, 536 aa, synthetic construct
  REGION 1..536: note = Variant of B-Glucocerebrosidase
MEFSSPSREECPKPLSRVSIMAGSLTGLILLQAVSWASGARPCIPKSFGYSSVVCVCNATYCDSVDPLTLPALGTFSRYESTRSGRRMELSMGPIQANRTGTGLLLTLQPEQKFQKVKGFGGAMTDAAALNILALSPPAQNLLLKSYFSEEGIEYNIIRVPMASCDFSIRTYTYADTPDDFQLHNFSLPEEDTKWKIPLIHRALQLSQRPVSLFASPWTSPTWLKTNGAYNGKGSLKGQPGDIYHQTWARYFVKFLDAYAEQGLQFWAVTAENEPTAGLLSGYPFQCLGFTPEHQRDFIARDLGPTLANSTHHNVRLLILDDQRLLLPHWAKVVLENPEAAKYVHGIAVHWYLDFLAPAKWTLGETHRLFPNTTLFASEACVGSKFWEQSVRLGSWDRGMQYSHSIIENLLYHVVGWTDWNLALNPEGGPNWVRNFVDSPIIVDITKDTFYKQPMFYHLGHFSKFIPEGSTRVGLVASQKNDLDAVALLHPDGSGVVVVLNRSSKDVPLTIKDPAVGFLETISPGYSIHTYLWRRQ

SEQ ID NO: 1421 - DNA, 1608 bp, synthetic construct
  misc_feature 1..1608: note = Variant of B-Glucocerebrosidase
  source 1..1608: mol_type = other DNA
atggagttttcttctcctagtagagaagaatgccccaagccactgagcagggtgagcatcatggctggatccctcacagggctgatacttttgcaggcagtctcatgggcctctggagccaggccctgtattcccaagtcattcggctactcctcagtggtgtgtgtatgcaatgccacctattgtgacagtgtcgatcctctcactctccctgctctgggtaccttctcccggtatgagagcacaagaagtggaagacgcatggagctctcaatgggccctatacaggctaaccgcactgggacaggtctgctgctgaccctccaacctgaacagaagtttcagaaagtcaagggatttggaggagccatgactgatgcagcagcactcaacatcttggccctgtctccaccagcccagaacctgctgttgaagtcctacttctcagaggaggggattgagtacaacatcatccgggttcccatggctagctgtgacttctccattaggacctatacatacgctgacacccccgatgattttacactccataatttcagtctccctgaagaagacaccaaatggaagatacctctgattcacagagccttgcaactgtcccaaaggccagtgagcctcttcgcttctccctggactagtcctacatggctgaagactaatggtgcttacaatgggaagggctccctgaaaggacagccaggtgacatatatcatcagacatgggcccgctactttgtgaaattccttgatgcctatgcagagcaggggctccaattctgggcagtcaccgcagaaaacgagccctcagctgggctgctgtctggctacccctttcagtgcttgggctttactcctgagcatcaacgggacttcattgcccgggatttggggccaacactggccaacagcacccaccacaatgtaagactcctcattctggatgaccagaggctgctgctccctcattgggccaaggtggtgttgacaaacccagaagctgccaaatatgttcatggcatcgctgtccactggtacctggattttttggcccctgccaagtggactctgggagagacccacagactcttccccaataccacactgtttgcatcagaagcctgcgtggggagcaaattctgggagcagtctgttaggctgggttcctgggatcggggcatgcaatattcccatagtataatagagaacctcctctaccacgtggtaggatggacagactggaatctggctttgaacccagaaggaggccccaattgggtgcgcaactttgttgacagccccatcattgtggatatcacaaaggacaccttctacaaacagcctatgttctatcatatggggcactttagcaagttcattccagagggttccactagagtaggcttggttgcctcacagaagaatgatctggatgctgtggcactcctgcatcctgacgggagtgcagtggtggtagtactgaacaggtctagcaaagatgttcccttgactatcaaagacccagctgtgggctttctggaaaccatttcccctggatactctatccacacctatgtctggagaagacag

SEQ ID NO: 1422 - protein, 536 aa, synthetic construct
  REGION 1..536: note = Variant of B-Glucocerebrosidase
MEFSSPSREECPKPLSRVSIMAGSLTGLILLQAVSWASGARPCIPKSFGYSSVVCVCNATYCDSVDPLTLPALGTFSRYESTRSGRRMELSMGPIQANRTGTGLLLTLQPEQKFQKVKGFGGAMTDAAALNILALSPPAQNLLLKSYFSEEGIEYNIIRVPMASCDFSIRTYTYADTPDDFTLHNFSLPEEDTKWKIPLIHRALQLSQRPVSLFASPWTSPTWLKTNGAYNGKGSLKGQPGDIYHQTWARYFVKFLDAYAEQGLQFWAVTAENEPSAGLLSGYPFQCLGFTPEHQRDFIARDLGPTLANSTHHNVRLLILDDQRLLLPHWAKVVLTNPEAAKYVHGIAVHWYLDFLAPAKWTLGETHRLFPNTTLFASEACVGSKFWEQSVRLGSWDRGMQYSHSIIENLLYHVVGWTDWNLALNPEGGPNWVRNFVDSPIIVDITKDTFYKQPMFYHMGHFSKFIPEGSTRVGLVASQKNDLDAVALLHPDGSAVVVVLNRSSKDVPLTIKDPAVGFLETISPGYSIHTYVWRRQ

SEQ ID NO: 1423 - DNA, 1608 bp, synthetic construct
  misc_feature 1..1608: note = Variant of B-Glucocerebrosidase
  source 1..1608: mol_type = other DNA
atggagttttcttctcctagtagagaagaatgccccaagccactgagcagggtgagcatcatggctggatccctcacagggctgcttcttttgcaggcagtctcatgggcctctggagccaggccctgtattcccaagtcattcggctactcctcagtggtgtgtgtatgcaatgccacctattgtgacagtgtcgatcctctcactctccctgctctgggtaccttctcccggtatgagagcacaagaagtggaagacgcatggagctctcaaagggccctatacaggcaaacggcactggggctggtctgctgctgaccctccaacctgaacagaagtttcagaaagtcaagggatttggaggagccatgactgatgcagcagcactcaacatcttggccctgtctccaccagcccagaacctgctgttgaagtcctacttctcagaggaggggattgagtacaacatcatccgggttcccatggctagctgtgacttctccattaggacctatacatacgctgacacccccgatgattttcagctccataatttcagtctccctgaagaagacaccaaatggaagatacctctgattcacagagccttgcaactgtcccaaaggccagtgagcctcttcgcttctccctggactagtcctacatggctgaagactaatggtgcttacaatgggaagggctccctgaaaggacagccaggtgacatatatcatcagacatgggcccgctactttgtgaaattccttgatgcctatgcagagcacgggctccaattctgggcagtcaccgcagaaaacgagccctcagctgggctgctgtctggctacccctttcagtgcttgggctttactcctgagcatcaacgggacttcattgcccgggatttggggccaacactggccaacagcacccaccacaatgtaagactcctcattctggatgaccagaggctgctgctccctcattgggccaaggtggtgttgacaaacccagaagctgccaaatatgttcatggcatcgctgtccactggtacctggattttttggcccctgccaagtggactctgggagagacccacagactcttccccaataccacactgtttgcatcagaagcctgcgtggggagcaaattctgggagcagtctgttaggctgggttcctgggatcggggcatgcaatattcccatagtataatagagaacctcctctaccacgtggtaggatggacagactggaatctggctttgaacccagaaggaggccccaattgggtgcgcaactttgttgacagccccatcattgtggatatcacaaaggacaccttctacaaacagcctatgttctatcatctggggcactttagcaagttcattccagagggttccactagagtaggcttggttgcctcacagaagaatgatctggatgctgtggcactcctgcatcctgacgggagtgcagtggtggtagtactgaacaagtctagcaaagatgttcccttgactatcaaagacccagctgtgggctttctggaaaccatttcccctggatactctatccacacctatctctggagaagacag

SEQ ID NO: 1424 - protein, 536 aa, synthetic construct
  REGION 1..536: note = Variant of B-Glucocerebrosidase
MEFSSPSREECPKPLSRVSIMAGSLTGLLLLQAVSWASGARPCIPKSFGYSSVVCVCNATYCDSVDPLTLPALGTFSRYESTRSGRRMELSKGPIQANGTGAGLLLTLQPEQKFQKVKGFGGAMTDAAALNILALSPPAQNLLLKSYFSEEGIEYNIIRVPMASCDFSIRTYTYADTPDDFQLHNFSLPEEDTKWKIPLIHRALQLSQRPVSLFASPWTSPTWLKTNGAYNGKGSLKGQPGDIYHQTWARYFVKFLDAYAEHGLQFWAVTAENEPSAGLLSGYPFQCLGFTPEHQRDFIARDLGPTLANSTHHNVRLLILDDQRLLLPHWAKVVLTNPEAAKYVHGIAVHWYLDFLAPAKWTLGETHRLFPNTTLFASEACVGSKFWEQSVRLGSWDRGMQYSHSIIENLLYHVVGWTDWNLALNPEGGPNWVRNFVDSPIIVDITKDTFYKQPMFYHLGHFSKFIPEGSTRVGLVASQKNDLDAVALLHPDGSAVVVVLNKSSKDVPLTIKDPAVGFLETISPGYSIHTYLWRRQ

SEQ ID NO: 1425 - DNA, 1608 bp, synthetic construct
  misc_feature 1..1608: note = Variant of B-Glucocerebrosidase
  source 1..1608: mol_type = other DNA
atggagttttcttctcctagtagagaagaatgccccaagccactgagcagggtgagcatcatggctggatccctcacagggctgatacttttgcaggcagtctcatgggcctctggagccaggccctgtattcccaagtcattcggctactcctcagtggtgtgtgtatgcaatgccacctattgtgacagtgtcgatcctctcactctccctgctctgggtaccttctcccggtatgagagcacaagaagtggaagacgcatggagctctcaatgggccctatacagaggaaccgcactggggctggtctgctgctgaccctccaacctgaacagaagtttcagaaagtcaagggatttggaggagccatgactgatgcagcagcactcaacatcttggccctgtctccaccagcccagaacctgctgttgaagtcctacttctcagaggaggggattgagtacaacatcatccgggttcccatggctagctgtgacttctccattaggacctatacatacgctgacacccccgatgattttatgctccataatttcagtctccctgaagaagacaccaaatggaagatacctctgattcacagagccttgcaactgtcccaaaggccagtgagcctcttcgcttctccctggactagtcctacatggctgaagactaatggtgcttacaatgggaagggctccctgaaaggacagccaggtgacatatatcatcagacatgggcccgctactttgtgaaattccttgatgcctatgcagagcacgggctccaattctgggcagtcaccgcagaaaacgagccctcagctgggctgctgtctggctacccctttcagtgcttgggctttactcctgagcatcaacgggacttcattgcccgggatttggggccaacactggccaacagcacccaccacaatgtaagactcctcattctggatgaccagaggctgctgctccctcattgggccaaggtggtgttgacaaacccagaagctgccaaatatgttcatggcatcgctgtccactggtacctggattttttggcccctgccaagtggactctgggagagacccacagactcttccccaataccacactgtttgcatcagaagcctgcgtggggagcaaattctgggagcagtctgttaggctgggttcctgggatcggggcatgcaatattcccatagtataatagagaacctcctctaccacgtggtaggatggacagactggaatctggctttgaacccagaaggaggccccaattgggtgcgcaactttgttgacagccccatcattgtggatatcacaaaggacaccttctacaaacagcctatgttctatcatctggggcactttagcaagttcattccagagggttccactagagtaggcttggttgcctcacagaagaatgatctggatgctgtggcactcctgcatcctgacgggagtgcagtggtggtagtactgaacaagtctagcaaagatgttcccttgactatcaaagacccagctgtgggctttctggaaaccatttcccctggatactctatccacacctatgtctggagaagacag

SEQ ID NO: 1426 - protein, 536 aa, synthetic construct
  REGION 1..536: note = Variant of B-Glucocerebrosidase
MEFSSPSREECPKPLSRVSIMAGSLTGLILLQAVSWASGARPCIPKSFGYSSVVCVCNATYCDSVDPLTLPALGTFSRYESTRSGRRMELSMGPIQRNRTGAGLLLTLQPEQKFQKVKGFGGAMTDAAALNILALSPPAQNLLLKSYFSEEGIEYNIIRVPMASCDFSIRTYTYADTPDDFMLHNFSLPEEDTKWKIPLIHRALQLSQRPVSLFASPWTSPTWLKTNGAYNGKGSLKGQPGDIYHQTWARYFVKFLDAYAEHGLQFWAVTAENEPSAGLLSGYPFQCLGFTPEHQRDFIARDLGPTLANSTHHNVRLLILDDQRLLLPHWAKVVLTNPEAAKYVHGIAVHWYLDFLAPAKWTLGETHRLFPNTTLFASEACVGSKFWEQSVRLGSWDRGMQYSHSIIENLLYHVVGWTDWNLALNPEGGPNWVRNFVDSPIIVDITKDTFYKQPMFYHLGHFSKFIPEGSTRVGLVASQKNDLDAVALLHPDGSAVVVVLNKSSKDVPLTIKDPAVGFLETISPGYSIHTYVWRRQ

SEQ ID NO: 1427 - DNA, 1608 bp, synthetic construct
  misc_feature 1..1608: note = Variant of B-Glucocerebrosidase
  source 1..1608: mol_type = other DNA
atggagttttcttctcctagtagagaagaatgccccaagccactgagcagggtgagcatcatggctggatccctcacagggctgcttcttttgcaggcagtctcatgggcctctggagccaggccctgtattcccaagtcattcggctactcctcagtggtgtgtgtatgcaatgccacctattgtgacagtgtcgatcctctcactctccctgctctgggtaccttctcccggtatgagagcacaagaagtggaagacgcatggagctctcaatgggccctatacaggctaaccgcactgggacaggtctgctgctgaccctccaacctgaacagaagtttcagaaagtcaagggatttggaggagccatgactgatgcagcagcactcaacatcttggccctgtctccaccagcccagaacctgctgttgaagtcctacttctcagaggaggggattgagtacaacatcatccgggttcccatggctagctgtgacttctccattaggacctatacatacgctgacacccccgatgattttcagctccataatttcagtctccctgaagaagacaccaaatggaagatacctctgattcacagagccttgcaactgtcccaaaggccagtgagcctcttcgcttctccctggactagtcctacatggctgaagactaatggtgcttacaatgggaagggctccctgaaaggacagccaggtgacatatatcatcagacatgggcccgctactttgtgaaattccttgatgcctatgcagagcacgggctccaattctgggcagtcaccgcagaaaacgagccctcagctgggctgctgtctggctacccctttcagtgcttgggctttactcctgagcatcaacgggacttcattgcccgggatttggggccaacactggccaacagcacccaccacaatgtaagactcctcattctggatgaccagaggctgctgctccctcattgggccaaggtggtgttggagaacccagaagctgccaaatatgttcatggcatcgctgtccactggtacctggattttttggcccctgccaagtggactctgggagagacccacagactcttccccaataccacactgtttgcatcagaagcctgcgtggggagcaaattctgggagcagtctgttaggctgggttcctgggatcggggcatgcaatattcccatagtataatagagaacctcctctaccacgtggtaggatggacagactggaatctggctttgaacccagaaggaggccccaattgggtgcgcaactttgttgacagccccatcattgtggatatcacaaaggacaccttctacaaacagcctatgttctatcatatggggcactttagcaagttcattccagagggttccactagagtaggcttggttgcctcacagaagaatgatctggatgctgtggcactcctgcatcctgacgggagtagcgtggtggtagtactgaacaagtctagcaaagatgttcccttgactatcaaagacccagctgtgggctttctggaaaccatttcccctggatactctatccacacctatgtctggagaagacag

SEQ ID NO: 1428 - protein, 536 aa, synthetic construct
  REGION 1..536: note = Variant of B-Glucocerebrosidase
MEFSSPSREECPKPLSRVSIMAGSLTGLLLLQAVSWASGARPCIPKSFGYSSVVCVCNATYCDSVDPLTLPALGTFSRYESTRSGRRMELSMGPIQANRTGTGLLLTLQPEQKFQKVKGFGGAMTDAAALNILALSPPAQNLLLKSYFSEEGIEYNIIRVPMASCDFSIRTYTYADTPDDFQLHNFSLPEEDTKWKIPLIHRALQLSQRPVSLFASPWTSPTWLKTNGAYNGKGSLKGQPGDIYHQTWARYFVKFLDAYAEHGLQFWAVTAENEPSAGLLSGYPFQCLGFTPEHQRDFIARDLGPTLANSTHHNVRLLILDDQRLLLPHWAKVVLENPEAAKYVHGIAVHWYLDFLAPAKWTLGETHRLFPNTTLFASEACVGSKFWEQSVRLGSWDRGMQYSHSIIENLLYHVVGWTDWNLALNPEGGPNWVRNFVDSPIIVDITKDTFYKQPMFYHMGHFSKFIPEGSTRVGLVASQKNDLDAVALLHPDGSSVVVVLNKSSKDVPLTIKDPAVGFLETISPGYSIHTYVWRRQ

SEQ ID NO: 1429 - DNA, 1608 bp, synthetic construct
  misc_feature 1..1608: note = Variant of B-Glucocerebrosidase
  source 1..1608: mol_type = other DNA
atggagttttcttctcctagtagagaagaatgccccaagccactgagcagggtgagcatcatggctggatccctcacagggctgcttcttttgcaggcagtctcatgggcctctggagccaggccctgtattcccaagtcattcggctactcctcagtggtgtgtgtatgcaatgccacctattgtgacagtgtcgatcctctcactctccctgctctgggtaccttctcccggtatgagagcacaagaagtggaagacgcatggagctctcaatgggccctatacaggcaaaccgcactgggaccggtctgctgctgaccctccaacctgaacagaagtttcagaaagtcaagggatttggaggagccatgactgatgcagcagcactcaacatcttggccctgtctccaccagcccagaacctgctgttgaagtcctacttctcaaccgaggggattgagtacaacatcatccgggttcccatggctagctgtgacttctccattaggacctatacatacgctgacacccccgatgattttacactccataatttcagtctccctgaagaagacaccaaatggaagatacctctgattcacagagccttgcaactgtcccaaaggccagtgagcctcttcgcttctccctggactagtcctacatggctgaagactaatggtgcttacaatgggaagggctccctgaaaggacagccaggtgacatatatcatcagacatgggcccgctactttgtgaaattccttgatgcctatgcagagcacgggctccaattctgggcagtcaccgcagaaaacgagccctcagctgggctgctgtctggctacccctttcagtgcttgggctttactcctgagcatcaacgggacttcattgcccgggatttggggccaacactggccaacagcacccaccacaatgtaagactcctcattctggatgaccagaggctgctgctccctcattgggccaaggtggtgttggagaacccagaagctgccaaatatgttcatggcatcgctgtccactggtacctggattttttggcccctgccaagtggactctgggagagacccacagactcttccccaataccacactgtttgcatcagaagcctgcgtggggagcaaattctgggagcaggccgttaggctgggttcctgggatcggggcatgcaatattcccatagtataatagagaacctcctctaccacgtggtaggatggacagactggaatctggctttgaacccagaaggaggccccaattgggtgcgcaactttgttgacagccccatcattgtggatatcacaaaggacaccttctacaaacagcctatgttctatcatctggggcactttagcaagttcattccagagggttccactagagtaggcttggttgcctcacagaagaatgatctggatgctgtggcactcctgcatcctgacgggagtgcagtggtggtagtactgaacaggtctagcaaagatgttcccttgactatcaaagacccagctgtgggctttctggaaaccatttcccctggatactctatccacacctatctctggagaagacag

SEQ ID NO: 1430 - protein, 536 aa, synthetic construct
  REGION 1..536: note = Variant of B-Glucocerebrosidase
MEFSSPSREECPKPLSRVSIMAGSLTGLLLLQAVSWASGARPCIPKSFGYSSVVCVCNATYCDSVDPLTLPALGTFSRYESTRSGRRMELSMGPIQANRTGTGLLLTLQPEQKFQKVKGFGGAMTDAAALNILALSPPAQNLLLKSYFSTEGIEYNIIRVPMASCDFSIRTYTYADTPDDFTLHNFSLPEEDTKWKIPLIHRALQLSQRPVSLFASPWTSPTWLKTNGAYNGKGSLKGQPGDIYHQTWARYFVKFLDAYAEHGLQFWAVTAENEPSAGLLSGYPFQCLGFTPEHQRDFIARDLGPTLANSTHHNVRLLILDDQRLLLPHWAKVVLENPEAAKYVHGIAVHWYLDFLAPAKWTLGETHRLFPNTTLFASEACVGSKFWEQAVRLGSWDRGMQYSHSIIENLLYHVVGWTDWNLALNPEGGPNWVRNFVDSPIIVDITKDTFYKQPMFYHLGHFSKFIPEGSTRVGLVASQKNDLDAVALLHPDGSAVVVVLNRSSKDVPLTIKDPAVGFLETISPGYSIHTYLWRRQ

SEQ ID NO: 1431 - DNA, 1608 bp, synthetic construct
  misc_feature 1..1608: note = Variant of B-Glucocerebrosidase
  source 1..1608: mol_type = other DNA
atggagttttcttctcctagtagagaagaatgccccaagccactgagcagggtgagcatcatggctggatccctcacagggctgcttcttttgcaggcagtctcatgggcctctggagccaggccctgtattcccaagtcattcggctactcctcagtggtgtgtgtatgcaatgccacctattgtgacagtgtcgatcctctcactctccctgctctgggtaccttctcccggtatgagagcacaagaagtggaagacgcatggagctctcaatgggccctatacaggctaaccgcactgggacaggtctgctgctgaccctccaacctgaacagaagtttcagaaagtcaagggatttggaggagccatgactgatgcagcagcactcaacatcttggccctgtctccaccagcccagaacctgctgttgaagtcctacttctcaaccgaggggattgagtacaacatcatccgggttcccatggctagctgtgacttctccattaggacctatacatacgctgacacccccgatgattttcagctccataatttcagtctccctgaagaagacaccaaatggaagatacctctgattcacagagccttgcaactgtcccaaaggccagtgagcctcttcgcttctccctggactagtcctacatggctgaagactaatggtgcttacaatgggaagggctccctgaaaggacagccaggtgacatatatcatcagacatgggcccgctactttgtgaaattccttgatgcctatgcagagcaggggctccaattctgggcagtcaccgcagaaaacgagccctcagctgggctgctgtctggctacccctttcagtgcttgggctttactcctgagcatcaacgggacttcattgcccgggatttggggccaacactggccaacagcacccaccacaatgtaagactcctcattctggatgaccagaggctgctgctccctcattgggccaaggtggtgttgacaaacccagaagctgccaaatatgttcatggcatcgctgtccactggtacctggattttttggcccctgccaagtggactctgggagagacccacagactcttccccaataccacactgtttgcatcagaagcctgcgtggggagcaaattctgggagcagtctgttaggctgggttcctgggatcggggcatgcaatattcccatagtataatagagaacctcctctaccacgtggtaggatggacagactggaatctggctttgaacccagaaggaggccccaattgggtgcgcaactttgttgacagccccatcattgtggatatcacaaaggacaccttctacaaacagcctatgttctatcatctggggcactttagcaagttcattccagagggttccactagagtaggcttggttgcctcacagaagaatgatctggatgctgtggcactcctgcatcctgacgggagtggagtggtggtagtactgaacaggtctagcaaagatgttcccttgactatcaaagacccagctgtgggctttctggaaaccatttcccctggatactctatccacacctatctctggagaagacag

SEQ ID NO: 1432 - protein, 536 aa, synthetic construct
  REGION 1..536: note = Variant of B-Glucocerebrosidase
MEFSSPSREECPKPLSRVSIMAGSLTGLLLLQAVSWASGARPCIPKSFGYSSVVCVCNATYCDSVDPLTLPALGTFSRYESTRSGRRMELSMGPIQANRTGTGLLLTLQPEQKFQKVKGFGGAMTDAAALNILALSPPAQNLLLKSYFSTEGIEYNIIRVPMASCDFSIRTYTYADTPDDFQLHNFSLPEEDTKWKIPLIHRALQLSQRPVSLFASPWTSPTWLKTNGAYNGKGSLKGQPGDIYHQTWARYFVKFLDAYAEQGLQFWAVTAENEPSAGLLSGYPFQCLGFTPEHQRDFIARDLGPTLANSTHHNVRLLILDDQRLLLPHWAKVVLTNPEAAKYVHGIAVHWYLDFLAPAKWTLGETHRLFPNTTLFASEACVGSKFWEQSVRLGSWDRGMQYSHSIIENLLYHVVGWTDWNLALNPEGGPNWVRNFVDSPIIVDITKDTFYKQPMFYHLGHFSKFIPEGSTRVGLVASQKNDLDAVALLHPDGSGVVVVLNRSSKDVPLTIKDPAVGFLETISPGYSIHTYLWRRQ

SEQ ID NO: 1433 - DNA, 1608 bp, synthetic construct
  misc_feature 1..1608: note = Variant of B-Glucocerebrosidase
  source 1..1608: mol_type = other DNA
atggagttttcttctcctagtagagaagaatgccccaagccactgagcagggtgagcatcatggctggatccctcacagggctgatacttttgcaggcagtctcatgggcctctggagccaggccctgtattcccaagtcattcggctactcctcagtggtgtgtgtatgcaatgccacctattgtgacagtgtcgatcctctcactctccctgctctgggtaccttctcccggtatgagagcacaagaagtggaagacgcatggagctctcaatgggccctatacaggctaaccgcactgggacaggtctgctgctgaccctccaacctgaacagaagtttcagaaagtcaagggatttggaggagccatgactgatgcagcagcactcaacatcttggccctgtctccaccagcccagaacctgctgttgaagtcctacttctcagaggaggggattgagtacaacatcatccgggttcccatggctagctgtgacttctccattaggacctatacatacgctgacacccccgatgattttcagctccataatttcagtctccctgaagaagacaccaaatggaagatacctctgattcacagagccttgcaactgtcccaaaggccagtgagcctcttcgcttctccctggactagtcctacatggctgaagactaatggtgcttacaatgggaagggctccctgaaaggacagccaggtgacatatatcatcagacatgggcccgctactttgtgaaattccttgatgcctatgcagagcacgggctccaattctgggcagtcaccgcagaaaacgagccctcagctgggctgctgtctggctacccctttcagtgcttgggctttactcctgagcatcaacgggacttcattgcccgggatttggggccaacactggccaacagcacccaccacaatgtaagactcctcattctggatgaccagaggctgctgctccctcattgggccaaggtggtgttgacaaacccagaagctgccaaatatgttcatggcatcgctgtccactggtacctggattttttggcccctgccaagtggactctgggagagacccacagactcttccccaataccacactgtttgcatcagaagcctgcgtggggagcaaattctgggagcagtctgttaggctgggttcctgggatcggggcatgcaatattcccatagtataatagagaacctcctctaccacgtggtaggatggacagactggaatctggctttgaacccagaaggaggccccaattgggtgcgcaactttgttgacagccccatcattgtggatatcacaaaggacaccttctacaaacagcctatgttctatcatctggggcactttagcaagttcattccagagggttccactagagtaggcttggttgcctcacagaagaatgatctggatgctgtggcactcctgcatcctgacgggagtagcgtggtggtagtactgaacaggtctagcaaagatgttcccttgactatcaaagacccagctgtgggctttctggaaaccatttcccctggatactctatccacacctatctctggagaagacag

SEQ ID NO: 1434 - protein, 536 aa, synthetic construct
  REGION 1..536: note = Variant of B-Glucocerebrosidase
MEFSSPSREECPKPLSRVSIMAGSLTGLILLQAVSWASGARPCIPKSFGYSSVVCVCNATYCDSVDPLTLPALGTFSRYESTRSGRRMELSMGPIQANRTGTGLLLTLQPEQKFQKVKGFGGAMTDAAALNILALSPPAQNLLLKSYFSEEGIEYNIIRVPMASCDFSIRTYTYADTPDDFQLHNFSLPEEDTKWKIPLIHRALQLSQRPVSLFASPWTSPTWLKTNGAYNGKGSLKGQPGDIYHQTWARYFVKFLDAYAEHGLQFWAVTAENEPSAGLLSGYPFQCLGFTPEHQRDFIARDLGPTLANSTHHNVRLLILDDQRLLLPHWAKVVLTNPEAAKYVHGIAVHWYLDFLAPAKWTLGETHRLFPNTTLFASEACVGSKFWEQSVRLGSWDRGMQYSHSIIENLLYHVVGWTDWNLALNPEGGPNWVRNFVDSPIIVDITKDTFYKQPMFYHLGHFSKFIPEGSTRVGLVASQKNDLDAVALLHPDGSSVVVVLNRSSKDVPLTIKDPAVGFLETISPGYSIHTYLWRRQ

SEQ ID NO: 1435 - DNA, 1608 bp, synthetic construct
  misc_feature 1..1608: note = Variant of B-Glucocerebrosidase
  source 1..1608: mol_type = other DNA
atggagttttcttctcctagtagagaagaatgccccaagccactgagcagggtgagcatcatggctggatccctcacagggctgatacttttgcaggcagtctcatgggcctctggagccaggccctgtattcccaagtcattcggctactcctcagtggtgtgtgtatgcaatgccacctattgtgacagtgtcgatcctctcactctccctgctctgggtaccttctcccggtatgagagcacaagaagtggaagacgcatggagctctcaatgggccctatacaggctaaccgcactggggctggtctgctgctgaccctccaacctgaacagaagtttcagaaagtcaagggatttggaggagccatgactgatgcagcagcactcaacatcttggccctgtctccaccagcccagaacctgctgttgaagtcctacttctcagaggaggggattgagtacaacatcatccgggttcccatggctagctgtgacttctccattaggacctatacatacgctgacacccccgatgattttacactccataatttcagtctccctgaagaagacaccaaatggaagatacctctgattcacagagccttgcaactgtcccaaaggccagtgagcctcttcgcttctccctggactagtcctacatggctgaagactaatggtgcttacaatgggaagggctccctgaaaggacagccaggtgacatatatcatcagacatgggcccgctactttgtgaaattccttgatgcctatgcagagcaggggctccaattctgggcagtcaccgcagaaaacgagccctcagctgggctgctgtctggctacccctttcagtgcttgggctttactcctgagcatcaacgggacttcattgcccgggatttggggccaacactggccaacagcacccaccacaatgtaagactcctcattctggatgaccagaggctgctgctccctcattgggccaaggtggtgttgacaaacccagaagctgccaaatatgttcatggcatcgctgtccactggtacctggattttttggcccctgccaagtggactctgggagagacccacagactcttccccaataccacactgtttgcatcagaagcctgcgtggggagcaaattctgggagcagtctgttaggctgggttcctgggatcggggcatgcaatattcccatagtataatagagaacctcctctaccacgtggtaggatggacagactggaatctggctttgaacccagaaggaggccccaattgggtgcgcaactttgttgacagccccatcattgtggatatcacaaaggacaccttctacaaacagcctatgttctatcatctggggcactttagcaagttcattccagagggttccactagagtaggcttggttgcctcacagaagaatgatctggatgctgtggcactcctgcatcctgacgggagtgcagtggtggtagtactgaacaagtctagcaaagatgttcccttgactatcaaagacccagctgtgggctttctggaaaccatttcccctggatactctatccacacctatctctggagaagacag

SEQ ID NO: 1436 - protein, 536 aa, synthetic construct
  REGION 1..536: note = Variant of B-Glucocerebrosidase
MEFSSPSREECPKPLSRVSIMAGSLTGLILLQAVSWASGARPCIPKSFGYSSVVCVCNATYCDSVDPLTLPALGTFSRYESTRSGRRMELSMGPIQANRTGAGLLLTLQPEQKFQKVKGFGGAMTDAAALNILALSPPAQNLLLKSYFSEEGIEYNIIRVPMASCDFSIRTYTYADTPDDFTLHNFSLPEEDTKWKIPLIHRALQLSQRPVSLFASPWTSPTWLKTNGAYNGKGSLKGQPGDIYHQTWARYFVKFLDAYAEQGLQFWAVTAENEPSAGLLSGYPFQCLGFTPEHQRDFIARDLGPTLANSTHHNVRLLILDDQRLLLPHWAKVVLTNPEAAKYVHGIAVHWYLDFLAPAKWTLGETHRLFPNTTLFASEACVGSKFWEQSVRLGSWDRGMQYSHSIIENLLYHVVGWTDWNLALNPEGGPNWVRNFVDSPIIVDITKDTFYKQPMFYHLGHFSKFIPEGSTRVGLVASQKNDLDAVALLHPDGSAVVVVLNKSSKDVPLTIKDPAVGFLETISPGYSIHTYLWRRQ

SEQ ID NO: 1437 - DNA, 1608 bp, synthetic construct
  misc_feature 1..1608: note = Variant of B-Glucocerebrosidase
  source 1..1608: mol_type = other DNA
atggagttttcttctcctagtagagaagaatgccccaagccactgagcagggtgagcatcatggctggatccctcacagggctgatacttttgcaggcagtctcatgggcctctggagccaggccctgtattcccaagtcattcggctactcctcagtggtgtgtgtatgcaatgccacctattgtgacagtgtcgatcctctcactctccctgctctgggtaccttctcccggtatgagagcacaagaagtggaagacgcatggagctctcaatgggccctatacaggcaaaccgcactgggaccggtctgctgctgaccctccaacctgaacagaagtttcagaaagtcaagggatttggaggagccatgactgatgcagcagcactcaacatcttggccctgtctccaccagcccagaacctgctgttgaagtcctacttctcagaggaggggattgagtacaacatcatccgggttcccatggctagctgtgacttctccattaggacctatacatacgctgacacccccgatgattttcagctccataatttcagtctccctgaagaagacaccaaatggaagatacctctgattcacagagccttgcaactgtcccaaaggccagtgagcctcttcgcttctccctggactagtcctacatggctgaagactaatggtgcttacaatgggaagggctccctgaaaggacagccaggtgacatatatcatcagacatgggcccgctactttgtgaaattccttgatgcctatgcagagcacgggctccaattctgggcagtcaccgcagaaaacgagccctcagctgggctgctgtctggctacccctttcagtgcttgggctttactcctgagcatcaacgggacttcattgcccgggatttggggccaacactggccaacagcacccaccacaatgtaagactcctcattctggatgaccagaggctgctgctccctcattgggccaaggtggtgttggagaacccagaagctgccaaatatgttcatggcatcgctgtccactggtacctggattttttggcccctgccaagtggactctgggagagacccacagactcttccccaataccacactgtttgcatcagaagcctgcgtggggagcaaattctgggagcagtctgttaggctgggttcctgggatcggggcatgcaatattcccatagtataatagagaacctcctctaccacgtggtaggatggacagactggaatctggctttgaacccagaaggaggccccaattgggtgcgcaactttgttgacagccccatcattgtggatatcacaaaggacaccttctacaaacagcctatgttctatcatatggggcactttagcaagttcattccagagggttccactagagtaggcttggttgcctcacagaagaatgatctggatgctgtggcactcctgcatcctgacgggagtgcagtggtggtagtactgaacaagtctagcaaagatgttcccttgactatcaaagacccagctgtgggctttctggaaaccatttcccctggatactctatccacacctatgtctggagaagacag

SEQ ID NO: 1438 - protein, 536 aa, synthetic construct
  REGION 1..536: note = Variant of B-Glucocerebrosidase
MEFSSPSREECPKPLSRVSIMAGSLTGLILLQAVSWASGARPCIPKSFGYSSVVCVCNATYCDSVDPLTLPALGTFSRYESTRSGRRMELSMGPIQANRTGTGLLLTLQPEQKFQKVKGFGGAMTDAAALNILALSPPAQNLLLKSYFSEEGIEYNIIRVPMASCDFSIRTYTYADTPDDFQLHNFSLPEEDTKWKIPLIHRALQLSQRPVSLFASPWTSPTWLKTNGAYNGKGSLKGQPGDIYHQTWARYFVKFLDAYAEHGLQFWAVTAENEPSAGLLSGYPFQCLGFTPEHQRDFIARDLGPTLANSTHHNVRLLILDDQRLLLPHWAKVVLENPEAAKYVHGIAVHWYLDFLAPAKWTLGETHRLFPNTTLFASEACVGSKFWEQSVRLGSWDRGMQYSHSIIENLLYHVVGWTDWNLALNPEGGPNWVRNFVDSPIIVDITKDTFYKQPMFYHMGHFSKFIPEGSTRVGLVASQKNDLDAVALLHPDGSAVVVVLNKSSKDVPLTIKDPAVGFLETISPGYSIHTYVWRRQ

SEQ ID NO: 1439 - DNA, 1608 bp, synthetic construct
  misc_feature 1..1608: note = Variant of B-Glucocerebrosidase
  source 1..1608: mol_type = other DNA
atggagttttcttctcctagtagagaagaatgccccaagccactgagcagggtgagcatcatggctggatccctcacagggctgcttcttttgcaggcagtctcatgggcctctggagccaggccctgtattcccaagtcattcggctactcctcagtggtgtgtgtatgcaatgccacctattgtgacagtgtcgatcctctcactctccctgctctgggtaccttctcccggtatgagagcacaagaagtggaagacgcatggagctctcaatgggccctatacaggctaaccgcactgggacaggtctgctgctgaccctccaacctgaacagaagtttcagaaagtcaagggatttggaggagccatgactgatgcagcagcactcaacatcttggccctgtctccaccagcccagaacctgctgttgaagtcctacttctcagaggaggggattgagtacaacatcatccgggttcccatggctagctgtgacttctccattaggacctatacatacgctgacacccccgatgattttatgctccataatttcagtctccctgaagaagacaccaaatggaagatacctctgattcacagagccttgcaactgtcccaaaggccagtgagcctcttcgcttctccctggactagtcctacatggctgaagactaatggtgcttacaatgggaagggctccctgaaaggacagccaggtgacatatatcatcagacatgggcccgctactttgtgaaattccttgatgcctatgcagagcacgggctccaattctgggcagtcaccgcagaaaacgagccctcagctgggctgctgtctggctacccctttcagtgcttgggctttactcctgagcatcaacgggacttcattgcccgggatttggggccaacactggccaacagcacccaccacaatgtaagactcctcattctggatgaccagaggctgctgctccctcattgggccaaggtggtgttgacaaacccagaagctgccaaatatgttcatggcatcgctgtccactggtacctggattttttggcccctgccaagtggactctgggagagacccacagactcttccccaataccacactgtttgcatcagaagcctgcgtggggagcaaattctgggagcagtctgttaggctgggttcctgggatcggggcatgcaatattcccatagtataatagagaacctcctctaccacgtggtaggatggacagactggaatctggctttgaacccagaaggaggccccaattgggtgcgcaactttgttgacagccccatcattgtggatatcacaaaggacaccttctacaaacagcctatgttctatcatctggggcactttagcaagttcattccagagggttccactagagtaggcttggttgcctcacagaagaatgatctggatgctgtggcactcctgcatcctgacgggagtggagtggtggtagtactgaacaagtctagcaaagatgttcccttgactatcaaagacccagctgtgggctttctggaaaccatttcccctggatactctatccacacctatgtctggagaagacag

SEQ ID NO: 1440 - protein, 536 aa, synthetic construct
  REGION 1..536: note = Variant of B-Glucocerebrosidase
MEFSSPSREECPKPLSRVSIMAGSLTGLLLLQAVSWASGARPCIPKSFGYSSVVCVCNATYCDSVDPLTLPALGTFSRYESTRSGRRMELSMGPIQANRTGTGLLLTLQPEQKFQKVKGFGGAMTDAAALNILALSPPAQNLLLKSYFSEEGIEYNIIRVPMASCDFSIRTYTYADTPDDFMLHNFSLPEEDTKWKIPLIHRALQLSQRPVSLFASPWTSPTWLKTNGAYNGKGSLKGQPGDIYHQTWARYFVKFLDAYAEHGLQFWAVTAENEPSAGLLSGYPFQCLGFTPEHQRDFIARDLGPTLANSTHHNVRLLILDDQRLLLPHWAKVVLTNPEAAKYVHGIAVHWYLDFLAPAKWTLGETHRLFPNTTLFASEACVGSKFWEQSVRLGSWDRGMQYSHSIIENLLYHVVGWTDWNLALNPEGGPNWVRNFVDSPIIVDITKDTFYKQPMFYHLGHFSKFIPEGSTRVGLVASQKNDLDAVALLHPDGSGVVVVLNKSSKDVPLTIKDPAVGFLETISPGYSIHTYVWRRQ

SEQ ID NO: 1441 - DNA, 1608 bp, synthetic construct
  misc_feature 1..1608: note = Variant of B-Glucocerebrosidase
  source 1..1608: mol_type = other DNA
atggagttttcttctcctagtagagaagaatgccccaagccactgagcagggtgagcatcatggctggatccctcacagggctgcttcttttgcaggcagtctcatgggcctctggagccaggccctgtattcccaagtcattcggctactcctcagtggtgtgtgtatgcaatgccacctattgtgacagtgtcgatcctctcactctccctgctctgggtaccttctcccggtatgagagcacaagaagtggaagacgcatggagctctcaatgggccctatacaggctaaccgcactggggctggtctgctgctgaccctccaacctgaacagaagtttcagaaagtcaagggatttggaggagccatgactgatgcagcagcactcaacatcttggccctgtctccaccagcccagaacctgctgttgaagtcctacttctcagaggaggggattgagtacaacatcatccgggttcccatggctagctgtgacttctccattaggacctatacatacgctgacacccccgatgattttcagctccataatttcagtctccctgaagaagacaccaaatggaagatacctctgattcacagagccttgcaactgtcccaaaggccagtgagcctcttcgcttctccctggactagtcctacatggctgaagactaatggtgcttacaatgggaagggctccctgaaaggacagccaggtgacatatatcatcagacatgggcccgctactttgtgaaattccttgatgcctatgcagagcacgggctccaattctgggcagtcaccgcagaaaacgagccctcagctgggctgctgtctggctacccctttcagtgcttgggctttactcctgagcatcaacgggacttcattgcccgggatttggggccaacactggccaacagcacccaccacaatgtaagactcctcattctggatgaccagaggctgctgctccctcattgggccaaggtggtgttggagaacccagaagctgccaaatatgttcatggcatcgctgtccactggtacctggattttttggcccctgccaagtggactctgggagagacccacagactcttccccaataccacactgtttgcatcagaagcctgcgtggggagcaaattctgggagcagtctgttaggctgggttcctgggatcggggcatgcaatattcccatagtataatagagaacctcctctaccacgtggtaggatggacagactggaatctggctttgaacccagaaggaggccccaattgggtgcgcaactttgttgacagccccatcattgtggatatcacaaaggacaccttctacaaacagcctatgttctatcatctggggcactttagcaagttcattccagagggttccactagagtaggcttggttgcctcacagaagaatgatctggatgctgtggcactcctgcatcctgacgggagtgcagtggtggtagtactgaacaggtctagcaaagatgttcccttgactatcaaagacccagctgtgggctttctggaaaccatttcccctggatactctatccacacctatctctggagaagacag

SEQ ID NO: 1442 - protein, 536 aa, synthetic construct
  REGION 1..536: note = Variant of B-Glucocerebrosidase
MEFSSPSREECPKPLSRVSIMAGSLTGLLLLQAVSWASGARPCIPKSFGYSSVVCVCNATYCDSVDPLTLPALGTFSRYESTRSGRRMELSMGPIQANRTGAGLLLTLQPEQKFQKVKGFGGAMTDAAALNILALSPPAQNLLLKSYFSEEGIEYNIIRVPMASCDFSIRTYTYADTPDDFQLHNFSLPEEDTKWKIPLIHRALQLSQRPVSLFASPWTSPTWLKTNGAYNGKGSLKGQPGDIYHQTWARYFVKFLDAYAEHGLQFWAVTAENEPSAGLLSGYPFQCLGFTPEHQRDFIARDLGPTLANSTHHNVRLLILDDQRLLLPHWAKVVLENPEAAKYVHGIAVHWYLDFLAPAKWTLGETHRLFPNTTLFASEACVGSKFWEQSVRLGSWDRGMQYSHSIIENLLYHVVGWTDWNLALNPEGGPNWVRNFVDSPIIVDITKDTFYKQPMFYHLGHFSKFIPEGSTRVGLVASQKNDLDAVALLHPDGSAVVVVLNRSSKDVPLTIKDPAVGFLETISPGYSIHTYLWRRQ

SEQ ID NO: 1443 - DNA, 1608 bp, synthetic construct
  misc_feature 1..1608: note = Variant of B-Glucocerebrosidase
  source 1..1608: mol_type = other DNA
atggagttttcttctcctagtagagaagaatgccccaagccactgagcagggtgagcatcatggctggatccctcacagggctgcttcttttgcaggcagtctcatgggcctctggagccaggccctgtattcccaagtcattcggctactcctcagtggtgtgtgtatgcaatgccacctattgtgacagtgtcgatcctctcactctccctgctctgggtaccttctcccggtatgagagcacaagaagtggaagacgcatggagctctcaatgggccctatacaggctaaccgcactgggacaggtctgctgctgaccctccaacctgaacagaagtttcagaaagtcaagggatttggaggagccatgactgatgcagcagcactcaacatcttggccctgtctccaccagcccagaacctgctgttgaagtcctacttctcaaccgaggggattgagtacaacatcatccgggttcccatggctagctgtgacttctccattaggacctatacatacgctgacacccccgatgattttatgctccataatttcagtctccctgaagaagacaccaaatggaagatacctctgattcacagagccttgcaactgtcccaaaggccagtgagcctcttcgcttctccctggactagtcctacatggctgaagactaatggtgcttacaatgggaagggctccctgaaaggacagccaggtgacatatatcatcagacatgggcccgctactttgtgaaattccttgatgcctatgcagagcaggggctccaattctgggcagtcaccgcagaaaacgagccctcagctgggctgctgtctggctacccctttcagtgcttgggctttactcctgagcatcaacgggacttcattgcccgggatttggggccaacactggccaacagcacccaccacaatgtaagactcctcattctggatgaccagaggctgctgctccctcattgggccaaggtggtgttgacaaacccagaagctgccaaatatgttcatggcatcgctgtccactggtacctggattttttggcccctgccaagtggactctgggagagacccacagactcttccccaataccacactgtttgcatcagaagcctgcgtggggagcaaattctgggagcagtctgttaggctgggttcctgggatcggggcatgcaatattcccatagtataatagagaacctcctctaccacgtggtaggatggacagactggaatctggctttgaacccagaaggaggccccaattgggtgcgcaactttgttgacagccccatcattgtggatatcacaaaggacaccttctacaaacagcctatgttctatcatctggggcactttagcaagttcattccagagggttccactagagtaggcttggttgcctcacagaagaatgatctggatgctgtggcactcctgcatcctgacgggagtagcgtggtggtagtactgaacaggtctagcaaagatgttcccttgactatcaaagacccagctgtgggctttctggaaaccatttcccctggatactctatccacacctatctctggagaagacag

SEQ ID NO: 1444 - protein, 536 aa, synthetic construct
  REGION 1..536: note = Variant of B-Glucocerebrosidase
MEFSSPSREECPKPLSRVSIMAGSLTGLLLLQAVSWASGARPCIPKSFGYSSVVCVCNATYCDSVDPLTLPALGTFSRYESTRSGRRMELSMGPIQANRTGTGLLLTLQPEQKFQKVKGFGGAMTDAAALNILALSPPAQNLLLKSYFSTEGIEYNIIRVPMASCDFSIRTYTYADTPDDFMLHNFSLPEEDTKWKIPLIHRALQLSQRPVSLFASPWTSPTWLKTNGAYNGKGSLKGQPGDIYHQTWARYFVKFLDAYAEQGLQFWAVTAENEPSAGLLSGYPFQCLGFTPEHQRDFIARDLGPTLANSTHHNVRLLILDDQRLLLPHWAKVVLTNPEAAKYVHGIAVHWYLDFLAPAKWTLGETHRLFPNTTLFASEACVGSKFWEQSVRLGSWDRGMQYSHSIIENLLYHVVGWTDWNLALNPEGGPNWVRNFVDSPIIVDITKDTFYKQPMFYHLGHFSKFIPEGSTRVGLVASQKNDLDAVALLHPDGSSVVVVLNRSSKDVPLTIKDPAVGFLETISPGYSIHTYLWRRQ

SEQ ID NO: 1445 - DNA, 1608 bp, synthetic construct
  misc_feature 1..1608: note = Variant of B-Glucocerebrosidase
  source 1..1608: mol_type = other DNA
atggagttttcttctcctagtagagaagaatgccccaagccactgagcagggtgagcatcatggctggatccctcacagggctgcttcttttgcaggcagtctcatgggcctctggagccaggccctgtattcccaagtcattcggctactcctcagtggtgtgtgtatgcaatgccacctattgtgacagtgtcgatcctctcactctccctgctctgggtaccttctcccggtatgagagcacaagaagtggaagacgcatggagctctcaatgggccctatacaggctaaccgcactgggacaggtctgctgctgaccctccaacctgaacagaagtttcagaaagtcaagggatttggaggagccatgactgatgcagcagcactcaacatcttggccctgtctccaccagcccagaacctgctgttgaagtcctacttctcagaggaggggattgagtacaacatcatccgggttcccatggctagctgtgacttctccattaggacctatacatacgctgacacccccgatgattttcagctccataatttcagtctccctgaagaagacaccaaatggaagatacctctgattcacagagccttgcaactgtcccaaaggccagtgagcctcttcgcttctccctggactagtcctacatggctgaagactaatggtgcttacaatgggaagggctccctgaaaggacagccaggtgacatatatcatcagacatgggcccgctactttgtgaaattccttgatgcctatgcagagcacgggctccaattctgggcagtcaccgcagaaaacgagccctcagctgggctgctgtctggctacccctttcagtgcttgggctttactcctgagcatcaacgggacttcattgcccgggatttggggccaacactggccaacagcacccaccacaatgtaagactcctcattctggatgaccagaggctgctgctccctcattgggccaaggtggtgttgacaaacccagaagctgccaaatatgttcatggcatcgctgtccactggtacctggattttttggcccctgccaagtggactctgggagagacccacagactcttccccaataccacactgtttgcatcagaagcctgcgtggggagcaaattctgggagcagtctgttaggctgggttcctgggatcggggcatgcaatattcccatagtataatagagaacctcctctaccacgtggtaggatggacagactggaatctggctttgaacccagaaggaggccccaattgggtgcgcaactttgttgacagccccatcattgtggatatcacaaaggacaccttctacaaacagcctatgttctatcatatggggcactttagcaagttcattccagagggttccactagagtaggcttggttgcctcacagaagaatgatctggatgctgtggcactcctgcatcctgacgggagtagcgtggtggtagtactgaacaagtctagcaaagatgttcccttgactatcaaagacccagctgtgggctttctggaaaccatttcccctggatactctatccacacctatgtctggagaagacag

SEQ ID NO: 1446 - protein, 536 aa, synthetic construct
  REGION 1..536: note = Variant of B-Glucocerebrosidase
MEFSSPSREECPKPLSRVSIMAGSLTGLLLLQAVSWASGARPCIPKSFGYSSVVCVCNATYCDSVDPLTLPALGTFSRYESTRSGRRMELSMGPIQANRTGTGLLLTLQPEQKFQKVKGFGGAMTDAAALNILALSPPAQNLLLKSYFSEEGIEYNIIRVPMASCDFSIRTYTYADTPDDFQLHNFSLPEEDTKWKIPLIHRALQLSQRPVSLFASPWTSPTWLKTNGAYNGKGSLKGQPGDIYHQTWARYFVKFLDAYAEHGLQFWAVTAENEPSAGLLSGYPFQCLGFTPEHQRDFIARDLGPTLANSTHHNVRLLILDDQRLLLPHWAKVVLTNPEAAKYVHGIAVHWYLDFLAPAKWTLGETHRLFPNTTLFASEACVGSKFWEQSVRLGSWDRGMQYSHSIIENLLYHVVGWTDWNLALNPEGGPNWVRNFVDSPIIVDITKDTFYKQPMFYHMGHFSKFIPEGSTRVGLVASQKNDLDAVALLHPDGSSVVVVLNKSSKDVPLTIKDPAVGFLETISPGYSIHTYVWRRQ

SEQ ID NO: 1447 - DNA, 1608 bp, synthetic construct
  misc_feature 1..1608: note = Variant of B-Glucocerebrosidase
  source 1..1608: mol_type = other DNA
atggagttttcttctcctagtagagaagaatgccccaagccactgagcagggtgagcatcatggctggatccctcacagggctgcttcttttgcaggcagtctcatgggcctctggagcccacccctgtattcccaagtcattcggctactcctcagtggtgtgtgtatgcaatgccacctattgtgacagtgtcgatcctctcactctccctgctctgggtaccttctcccggtatgagagcacaagaagtggaagacgcatggagctctcaatgggccctatacaggctaaccgcactgggacaggtctgctgctgaccctccaacctgaacagaagtttcagaaagtcaagggatttggaggagccatgactgatgcagcagcactcaacatcttggccctgtctccaccagcccagaacctgctgttgaagtcctacttctcagaggaggggattgagtacaacatcatccgggttcccatggctagctgtgacttctccattaggacctatacatacgctgacacccccgatgattttatgctccataatttcagtctccctgaagaagacaccaaatggaagatacctctgattcacagagccttgcaactgtcccaaaggccagtgagcctcttcgcttctccctggactagtcctacatggctgaagactaatggtgcttacaatgggaagggctccctgaaaggacagccaggtgacatatatcatcagacatgggcccgctactttgtgaaattccttgatgcctatgcagagcacgggctccaattctgggcagtcaccgcagaaaacgagccctcagctgggctgctgtctggctacccctttcagtgcttgggctttactcctgagcatcaacgggacttcattgcccgggatttggggccaacactggccaacagcacccaccacaatgtaagactcctcattctggatgaccagaggctgctgctccctcattgggccaaggtggtgttgacaaacccagaagctgccaaatatgttcatggcatcgctgtccactggtacctggattttttggcccctgccaagtggactctgggagagacccacagactcttccccaataccacactgtttgcatcagaagcctgcgtggggagcaaattctgggagcaggccgttaggctgggttcctgggatcggggcatgcaatattcccatagtataatagagaacctcctctaccacgtggtaggatggacagactggaatctggctttgaacccagaaggaggccccaattgggtgcgcaactttgttgacagccccatcattgtggatatcacaaaggacaccttctacaaacagcctatgttctatcatctggggcactttagcaagttcattccagagggttccactagagtaggcttggttgcctcacagaagaatgatctggatgctgtggcactcctgcatcctgacgggagtggagtggtggtagtactgaacaggtctagcaaagatgttcccttgactatcaaagacccagctgtgggctttctggaaaccatttcccctggatactctatccacacctatctctggagaagacag

SEQ ID NO: 1448 - protein, 536 aa, synthetic construct
  REGION 1..536: note = Variant of B-Glucocerebrosidase
MEFSSPSREECPKPLSRVSIMAGSLTGLLLLQAVSWASGAHPCIPKSFGYSSVVCVCNATYCDSVDPLTLPALGTFSRYESTRSGRRMELSMGPIQANRTGTGLLLTLQPEQKFQKVKGFGGAMTDAAALNILALSPPAQNLLLKSYFSEEGIEYNIIRVPMASCDFSIRTYTYADTPDDFMLHNFSLPEEDTKWKIPLIHRALQLSQRPVSLFASPWTSPTWLKTNGAYNGKGSLKGQPGDIYHQTWARYFVKFLDAYAEHGLQFWAVTAENEPSAGLLSGYPFQCLGFTPEHQRDFIARDLGPTLANSTHHNVRLLILDDQRLLLPHWAKVVLTNPEAAKYVHGIAVHWYLDFLAPAKWTLGETHRLFPNTTLFASEACVGSKFWEQAVRLGSWDRGMQYSHSIIENLLYHVVGWTDWNLALNPEGGPNWVRNFVDSPIIVDITKDTFYKQPMFYHLGHFSKFIPEGSTRVGLVASQKNDLDAVALLHPDGSGVVVVLNRSSKDVPLTIKDPAVGFLETISPGYSIHTYLWRRQ

SEQ ID NO: 1449 - DNA, 1608 bp, synthetic construct
  misc_feature 1..1608: note = Variant of B-Glucocerebrosidase
  source 1..1608: mol_type = other DNA
atggagttttcttctcctagtagagaagaatgccccaagccactgagcagggtgagcatcatggctggatccctcacagggctgatacttttgcaggcagtctcatgggcctctggagcccacccctgtattcccaagtcattcggctactcctcagtggtgtgtgtatgcaatgccacctattgtgacagtgtcgatcctctcactctccctgctctgggtaccttctcccggtatgagagcacaagaagtggaagacgcatggagctctcaatgggccctatacaggctaaccgcactgggacaggtctgctgctgaccctccaacctgaacagaagtttcagaaagtcaagggatttggaggagccatgactgatgcagcagcactcaacatcttggccctgtctccaccagcccagaacctgctgttgaagtcctacttctcagaggaggggattgagtacaacatcatccgggttcccatggctagctgtgacttctccattaggacctatacatacgctgacacccccgatgattttacactccataatttcagtctccctgaagaagacaccaaatggaagatacctctgattcacagagccttgcaactgtcccaaaggccagtgagcctcttcgcttctccctggactagtcctacatggctgaagactaatggtgcttacaatgggaagggctccctgaaaggacagccaggtgacatatatcatcagacatgggcccgctactttgtgaaattccttgatgcctatgcagagcacgggctccaattctgggcagtcaccgcagaaaacgagccctcagctgggctgctgtctggctacccctttcagtgcttgggctttactcctgagcatcaacgggacttcattgcccgggatttggggccaacactggccaacagcacccaccacaatgtaagactcctcattctggatgaccagaggctgctgctccctcattgggccaaggtggtgttggagaacccagaagctgccaaatatgttcatggcatcgctgtccactggtacctggattttttggcccctgccaagtggactctgggagagacccacagactcttccccaataccacactgtttgcatcagaagcctgcgtggggagcaaattctgggagcagtctgttaggctgggttcctgggatcggggcatgcaatattcccatagtataatagagaacctcctctaccacgtggtaggatggacagactggaatctggctttgaacccagaaggaggccccaattgggtgcgcaactttgttgacagccccatcattgtggatatcacaaaggacaccttctacaaacagcctatgttctatcatctggggcactttagcaagttcattccagagggttccactagagtaggcttggttgcctcacagaagaatgatctggatgctgtggcactcctgcatcctgacgggagtagcgtggtggtagtactgaacaggtctagcaaagatgttcccttgactatcaaagacccagctgtgggctttctggaaaccatttcccctggatactctatccacacctatctctggagaagacag

SEQ ID NO: 1450 - protein, 536 aa, synthetic construct
  REGION 1..536: note = Variant of B-Glucocerebrosidase
MEFSSPSREECPKPLSRVSIMAGSLTGLILLQAVSWASGAHPCIPKSFGYSSVVCVCNATYCDSVDPLTLPALGTFSRYESTRSGRRMELSMGPIQANRTGTGLLLTLQPEQKFQKVKGFGGAMTDAAALNILALSPPAQNLLLKSYFSEEGIEYNIIRVPMASCDFSIRTYTYADTPDDFTLHNFSLPEEDTKWKIPLIHRALQLSQRPVSLFASPWTSPTWLKTNGAYNGKGSLKGQPGDIYHQTWARYFVKFLDAYAEHGLQFWAVTAENEPSAGLLSGYPFQCLGFTPEHQRDFIARDLGPTLANSTHHNVRLLILDDQRLLLPHWAKVVLENPEAAKYVHGIAVHWYLDFLAPAKWTLGETHRLFPNTTLFASEACVGSKFWEQSVRLGSWDRGMQYSHSIIENLLYHVVGWTDWNLALNPEGGPNWVRNFVDSPIIVDITKDTFYKQPMFYHLGHFSKFIPEGSTRVGLVASQKNDLDAVALLHPDGSSVVVVLNRSSKDVPLTIKDPAVGFLETISPGYSIHTYLWRRQ

SEQ ID NO: 1451 - DNA, 1608 bp, synthetic construct
  misc_feature 1..1608: note = Variant of B-Glucocerebrosidase
  source 1..1608: mol_type = other DNA
atggagttttcttctcctagtagagaagaatgccccaagccactgagcagggtgagcatcatggctggatccctcacagggctgcttcttttgcaggcagtctcatgggcctctggagccaggccctgtattcccaagtcattcggctactcctcagtggtgtgtgtatgcaatgccacctattgtgacagtgtcgatcctctcactctccctgctctgggtaccttctcccggtatgagagcacaagaagtggaagacgcatggagctctcaatgggccctatacagaggaaccgcactggggctggtctgctgctgaccctccaacctgaacagaagtttcagaaagtcaagggatttggaggagccatgactgatgcagcagcactcaacatcttggccctgtctccaccagcccagaacctgctgttgaagtcctacttctcagaggaggggattgagtacaacatcatccgggttcccatggctagctgtgacttctccattaggacctatacatacgctgacacccccgatgattttcagctccataatttcagtctccctgaagaagacaccaaatggaagatacctctgattcacagagccttgcaactgtcccaaaggccagtgagcctcttcgcttctccctggactagtcctacatggctgaagactaatggtgcttacaatgggaagggctccctgaaaggacagccaggtgacatatatcatcagacatgggcccgctactttgtgaaattccttgatgcctatgcagagcacgggctccaattctgggcagtcaccgcagaaaacgagccctcagctgggctgctgtctggctacccctttcagtgcttgggctttactcctgagcatcaacgggacttcattgcccgggatttggggccaacactggccaacagcacccaccacaatgtaagactcctcattctggatgaccagaggctgctgctccctcattgggccaaggtggtgttgacaaacccagaagctgccaaatatgttcatggcatcgctgtccactggtacctggattttttggcccctgccaagtggactctgggagagacccacagactcttccccaataccacactgtttgcatcagaagcctgcgtggggagcaaattctgggagcagtctgttaggctgggttcctgggatcggggcatgcaatattcccatagtataatagagaacctcctctaccacgtggtaggatggacagactggaatctggctttgaacccagaaggaggccccaattgggtgcgcaactttgttgacagccccatcattgtggatatcacaaaggacaccttctacaaacagcctatgttctatcatctggggcactttagcaagttcattccagagggttccactagagtaggcttggttgcctcacagaagaatgatctggatgctgtggcactcctgcatcctgacgggagtagcgtggtggtagtactgaacaggtctagcaaagatgttcccttgactatcaaagacccagctgtgggctttctggaaaccatttcccctggatactctatccacacctatctctggagaagacag

SEQ ID NO: 1452 - protein, 536 aa, synthetic construct
  REGION 1..536: note = Variant of B-Glucocerebrosidase
MEFSSPSREECPKPLSRVSIMAGSLTGLLLLQAVSWASGARPCIPKSFGYSSVVCVCNATYCDSVDPLTLPALGTFSRYESTRSGRRMELSMGPIQRNRTGAGLLLTLQPEQKFQKVKGFGGAMTDAAALNILALSPPAQNLLLKSYFSEEGIEYNIIRVPMASCDFSIRTYTYADTPDDFQLHNFSLPEEDTKWKIPLIHRALQLSQRPVSLFASPWTSPTWLKTNGAYNGKGSLKGQPGDIYHQTWARYFVKFLDAYAEHGLQFWAVTAENEPSAGLLSGYPFQCLGFTPEHQRDFIARDLGPTLANSTHHNVRLLILDDQRLLLPHWAKVVLTNPEAAKYVHGIAVHWYLDFLAPAKWTLGETHRLFPNTTLFASEACVGSKFWEQSVRLGSWDRGMQYSHSIIENLLYHVVGWTDWNLALNPEGGPNWVRNFVDSPIIVDITKDTFYKQPMFYHLGHFSKFIPEGSTRVGLVASQKNDLDAVALLHPDGSSVVVVLNRSSKDVPLTIKDPAVGFLETISPGYSIHTYLWRRQ

SEQ ID NO: 1453 - DNA, 1608 bp, synthetic construct
  misc_feature 1..1608: note = Variant of B-Glucocerebrosidase
  source 1..1608: mol_type = other DNA
atggagttttcttctcctagtagagaagaatgccccaagccactgagcagggtgagcatcatggctggatccctcacagggctgcttcttttgcaggcagtctcatgggcctctggagccaggccctgtattcccaagtcattcggctactcctcagtggtgtgtgtatgcaatgccacctattgtgacagtgtcgatcctctcactctccctgctctgggtaccttctcccggtatgagagcacaagaagtggaagacgcatggagctctcaatgggccctatacaggcaaaccgcactgggaccggtctgctgctgaccctccaacctgaacagaagtttcagaaagtcaagggatttggaggagccatgactgatgcagcagcactcaacatcttggccctgtctccaccagcccagaacctgctgttgaagtcctacttctcagaggaggggattgagtacaacatcatccgggttcccatggctagctgtgacttctccattaggacctatacatacgctgacacccccgatgattttacactccataatttcagtctccctgaagaagacaccaaatggaagatacctctgattcacagagccttgcaactgtcccaaaggccagtgagcctcttcgcttctccctggactagtcctacatggctgaagactaatggtgcttacaatgggaagggctccctgaaaggacagccaggtgacatatatcatcagacatgggcccgctactttgtgaaattccttgatgcctatgcagagcaggggctccaattctgggcagtcaccgcagaaaacgagccctcagctgggctgctgtctggctacccctttcagtgcttgggctttactcctgagcatcaacgggacttcattgcccgggatttggggccaacactggccaacagcacccaccacaatgtaagactcctcattctggatgaccagaggctgctgctccctcattgggccaaggtggtgttgacaaacccagaagctgccaaatatgttcatggcatcgctgtccactggtacctggattttttggcccctgccaagtggactctgggagagacccacagactcttccccaataccacactgtttgcatcagaagcctgcgtggggagcaaattctgggagcagtctgttaggctgggttcctgggatcggggcatgcaatattcccatagtataatagagaacctcctctaccacgtggtaggatggacagactggaatctggctttgaacccagaaggaggccccaattgggtgcgcaactttgttgacagccccatcattgtggatatcacaaaggacaccttctacaaacagcctatgttctatcatctggggcactttagcaagttcattccagagggttccactagagtaggcttggttgcctcacagaagaatgatctggatgctgtggcactcctgcatcctgacgggagtagcgtggtggtagtactgaacaggtctagcaaagatgttcccttgactatcaaagacccagctgtgggctttctggaaaccatttcccctggatactctatccacacctatctctggagaagacag

SEQ ID NO: 1454 - protein, 536 aa, synthetic construct
  REGION 1..536: note = Variant of B-Glucocerebrosidase
MEFSSPSREECPKPLSRVSIMAGSLTGLLLLQAVSWASGARPCIPKSFGYSSVVCVCNATYCDSVDPLTLPALGTFSRYESTRSGRRMELSMGPIQANRTGTGLLLTLQPEQKFQKVKGFGGAMTDAAALNILALSPPAQNLLLKSYFSEEGIEYNIIRVPMASCDFSIRTYTYADTPDDFTLHNFSLPEEDTKWKIPLIHRALQLSQRPVSLFASPWTSPTWLKTNGAYNGKGSLKGQPGDIYHQTWARYFVKFLDAYAEQGLQFWAVTAENEPSAGLLSGYPFQCLGFTPEHQRDFIARDLGPTLANSTHHNVRLLILDDQRLLLPHWAKVVLTNPEAAKYVHGIAVHWYLDFLAPAKWTLGETHRLFPNTTLFASEACVGSKFWEQSVRLGSWDRGMQYSHSIIENLLYHVVGWTDWNLALNPEGGPNWVRNFVDSPIIVDITKDTFYKQPMFYHLGHFSKFIPEGSTRVGLVASQKNDLDAVALLHPDGSSVVVVLNRSSKDVPLTIKDPAVGFLETISPGYSIHTYLWRRQ

SEQ ID NO: 1455 - DNA, 1608 bp, synthetic construct
  misc_feature 1..1608: note = Variant of B-Glucocerebrosidase
  source 1..1608: mol_type = other DNA
atggagttttcttctcctagtagagaagaatgccccaagccactgagcagggtgagcatcatggctggatccctcacagggctgatacttttgcaggcagtctcatgggcctctggagccaggccctgtattcccaagtcattcggctactcctcagtggtgtgtgtatgcaatgccacctattgtgacagtgtcgatcctctcactctccctgctctgggtaccttctcccggtatgagagcacaagaagtggaagacgcatggagctctcaatgggccctatacaggctaaccgcactgggacaggtctgctgctgaccctccaacctgaacagaagtttcagaaagtcaagggatttggaggagccatgactgatgcagcagcactcaacatcttggccctgtctccaccagcccagaacctgctgttgaagtcctacttctcagaggaggggattgagtacaacatcatccgggttcccatggctagctgtgacttctccattaggacctatacatacgctgacacccccgatgattttcagctccataatttcagtctccctgaagaagacaccaaatggaagatacctctgattcacagagccttgcaactgtcccaaaggccagtgagcctcttcgcttctccctggactagtcctacatggctgaagactaatggtgcttacaatgggaagggctccctgaaaggacagccaggtgacatatatcatcagacatgggcccgctactttgtgaaattccttgatgcctatgcagagcaggggctccaattctgggcagtcaccgcagaaaacgagccctcagctgggctgctgtctggctacccctttcagtgcttgggctttactcctgagcatcaacgggacttcattgcccgggatttggggccaacactggccaacagcacccaccacaatgtaagactcctcattctggatgaccagaggctgctgctccctcattgggccaaggtggtgttgacaaacccagaagctgccaaatatgttcatggcatcgctgtccactggtacctggattttttggcccctgccaagtggactctgggagagacccacagactcttccccaataccacactgtttgcatcagaagcctgcgtggggagcaaattctgggagcagtctgttaggctgggttcctgggatcggggcatgcaatattcccatagtataatagagaacctcctctaccacgtggtaggatggacagactggaatctggctttgaacccagaaggaggccccaattgggtgcgcaactttgttgacagccccatcattgtggatatcacaaaggacaccttctacaaacagcctatgttctatcatctggggcactttagcaagttcattccagagggttccactagagtaggcttggttgcctcacagaagaatgatctggatgctgtggcactcctgcatcctgacgggagtgcagtggtggtagtactgaacaagtctagcaaagatgttcccttgactatcaaagacccagctgtgggctttctggaaaccatttcccctggatactctatccacacctatctctggagaagacag

SEQ ID NO: 1456 - protein, 536 aa, synthetic construct
  REGION 1..536: note = Variant of B-Glucocerebrosidase
MEFSSPSREECPKPLSRVSIMAGSLTGLILLQAVSWASGARPCIPKSFGYSSVVCVCNATYCDSVDPLTLPALGTFSRYESTRSGRRMELSMGPIQANRTGTGLLLTLQPEQKFQKVKGFGGAMTDAAALNILALSPPAQNLLLKSYFSEEGIEYNIIRVPMASCDFSIRTYTYADTPDDFQLHNFSLPEEDTKWKIPLIHRALQLSQRPVSLFASPWTSPTWLKTNGAYNGKGSLKGQPGDIYHQTWARYFVKFLDAYAEQGLQFWAVTAENEPSAGLLSGYPFQCLGFTPEHQRDFIARDLGPTLANSTHHNVRLLILDDQRLLLPHWAKVVLTNPEAAKYVHGIAVHWYLDFLAPAKWTLGETHRLFPNTTLFASEACVGSKFWEQSVRLGSWDRGMQYSHSIIENLLYHVVGWTDWNLALNPEGGPNWVRNFVDSPIIVDITKDTFYKQPMFYHLGHFSKFIPEGSTRVGLVASQKNDLDAVALLHPDGSAVVVVLNKSSKDVPLTIKDPAVGFLETISPGYSIHTYLWRRQ

SEQ ID NO: 1457 - DNA, 1608 bp, synthetic construct
  misc_feature 1..1608: note = Variant of B-Glucocerebrosidase
  source 1..1608: mol_type = other DNA
atggagttttcttctcctagtagagaagaatgccccaagccactgagcagggtgagcatcatggctggatccctcacagggctgatacttttgcaggcagtctcatgggcctctggagccaggccctgtattcccaagtcattcggctactcctcagtggtgtgtgtatgcaatgccacctattgtgacagtgtcgatcctctcactctccctgctctgggtaccttctcccggtatgagagcacaagaagtggaagacgcatggagctctcaatgggccctatacaggctaaccgcactggggctggtctgctgctgaccctccaacctgaacagaagtttcagaaagtcaagggatttggaggagccatgactgatgcagcagcactcaacatcttggccctgtctccaccagcccagaacctgctgttgaagtcctacttctcagaggaggggattgagtacaacatcatccgggttcccatggctagctgtgacttctccattaggacctatacatacgctgacacccccgatgattttcagctccataatttcagtctccctgaagaagacaccaaatggaagatacctctgattcacagagccttgcaactgtcccaaaggccagtgagcctcttcgcttctccctggactagtcctacatggctgaagactaatggtgcttacaatgggaagggctccctgaaaggacagccaggtgacatatatcatcagacatgggcccgctactttgtgaaattccttgatgcctatgcagagcacgggctccaattctgggcagtcaccgcagaaaacgagccctcagctgggctgctgtctggctacccctttcagtgcttgggctttactcctgagcatcaacgggacttcattgcccgggatttggggccaacactggccaacagcacccaccacaatgtaagactcctcattctggatgaccagaggctgctgctccctcattgggccaaggtggtgttgacaaacccagaagctgccaaatatgttcatggcatcgctgtccactggtacctggattttttggcccctgccaagtggactctgggagagacccacagactcttccccaataccacactgtttgcatcagaagcctgcgtggggagcaaattctgggagcagtctgttaggctgggttcctgggatcggggcatgcaatattcccatagtataatagagaacctcctctaccacgtggtaggatggacagactggaatctggctttgaacccagaaggaggccccaattgggtgcgcaactttgttgacagccccatcattgtggatatcacaaaggacaccttctacaaacagcctatgttctatcatctggggcactttagcaagttcattccagagggttccactagagtaggcttggttgcctcacagaagaatgatctggatgctgtggcactcctgcatcctgacgggagtgcagtggtggtagtactgaacaagtctagcaaagatgttcccttgactatcaaagacccagctgtgggctttctggaaaccatttcccctggatactctatccacacctatctctggagaagacag

SEQ ID NO: 1458 - protein, 536 aa, synthetic construct
  REGION 1..536: note = Variant of B-Glucocerebrosidase
MEFSSPSREECPKPLSRVSIMAGSLTGLILLQAVSWASGARPCIPKSFGYSSVVCVCNATYCDSVDPLTLPALGTFSRYESTRSGRRMELSMGPIQANRTGAGLLLTLQPEQKFQKVKGFGGAMTDAAALNILALSPPAQNLLLKSYFSEEGIEYNIIRVPMASCDFSIRTYTYADTPDDFQLHNFSLPEEDTKWKIPLIHRALQLSQRPVSLFASPWTSPTWLKTNGAYNGKGSLKGQPGDIYHQTWARYFVKFLDAYAEHGLQFWAVTAENEPSAGLLSGYPFQCLGFTPEHQRDFIARDLGPTLANSTHHNVRLLILDDQRLLLPHWAKVVLTNPEAAKYVHGIAVHWYLDFLAPAKWTLGETHRLFPNTTLFASEACVGSKFWEQSVRLGSWDRGMQYSHSIIENLLYHVVGWTDWNLALNPEGGPNWVRNFVDSPIIVDITKDTFYKQPMFYHLGHFSKFIPEGSTRVGLVASQKNDLDAVALLHPDGSAVVVVLNKSSKDVPLTIKDPAVGFLETISPGYSIHTYLWRRQ

SEQ ID NO: 1459 - DNA, 1608 bp, synthetic construct
  misc_feature 1..1608: note = Variant of B-Glucocerebrosidase
  source 1..1608: mol_type = other DNA
atggagttttcttctcctagtagagaagaatgccccaagccactgagcagggtgagcatcatggctggatccctcacagggctgcttcttttgcaggcagtctcatgggcctctggagccaggccctgtattcccaagtcattcggctactcctcagtggtgtgtgtatgcaatgccacctattgtgacagtgtcgatcctctcactctccctgctctgggtaccttctcccggtatgagagcacaagaagtggaagacgcatggagctctcaatgggccctatacaggcaaaccgcactgggaccggtctgctgctgaccctccaacctgaacagaagtttcagaaagtcaagggatttggaggagccatgactgatgcagcagcactcaacatcttggccctgtctccaccagcccagaacctgctgttgaagtcctacttctcagaggaggggattgagtacaacatcatccgggttcccatggctagctgtgacttctccattaggacctatacatacgctgacacccccgatgattttatgctccataatttcagtctccctgaagaagacaccaaatggaagatacctctgattcacagagccttgcaactgtcccaaaggccagtgagcctcttcgcttctccctggactagtcctacatggctgaagactaatggtgcttacaatgggaagggctccctgaaaggacagccaggtgacatatatcatcagacatgggcccgctactttgtgaaattccttgatgcctatgcagagcacgggctccaattctgggcagtcaccgcagaaaacgagccctcagctgggctgctgtctggctacccctttcagtgcttgggctttactcctgagcatcaacgggacttcattgcccgggatttggggccaacactggccaacagcacccaccacaatgtaagactcctcattctggatgaccagaggctgctgctccctcattgggccaaggtggtgttggagaacccagaagctgccaaatatgttcatggcatcgctgtccactggtacctggattttttggcccctgccaagtggactctgggagagacccacagactcttccccaataccacactgtttgcatcagaagcctgcgtggggagcaaattctgggagcagtctgttaggctgggttcctgggatcggggcatgcaatattcccatagtataatagagaacctcctctaccacgtggtaggatggacagactggaatctggctttgaacccagaaggaggccccaattgggtgcgcaactttgttgacagccccatcattgtggatatcacaaaggacaccttctacaaacagcctatgttctatcatctggggcactttagcaagttcattccagagggttccactagagtaggcttggttgcctcacagaagaatgatctggatgctgtggcactcctgcatcctgacgggagtagcgtggtggtagtactgaacaggtctagcaaagatgttcccttgactatcaaagacccagctgtgggctttctggaaaccatttcccctggatactctatccacacctatctctggagaagacag

SEQ ID NO: 1460 - protein, 536 aa, synthetic construct
  REGION 1..536: note = Variant of B-Glucocerebrosidase
MEFSSPSREECPKPLSRVSIMAGSLTGLLLLQAVSWASGARPCIPKSFGYSSVVCVCNATYCDSVDPLTLPALGTFSRYESTRSGRRMELSMGPIQANRTGTGLLLTLQPEQKFQKVKGFGGAMTDAAALNILALSPPAQNLLLKSYFSEEGIEYNIIRVPMASCDFSIRTYTYADTPDDFMLHNFSLPEEDTKWKIPLIHRALQLSQRPVSLFASPWTSPTWLKTNGAYNGKGSLKGQPGDIYHQTWARYFVKFLDAYAEHGLQFWAVTAENEPSAGLLSGYPFQCLGFTPEHQRDFIARDLGPTLANSTHHNVRLLILDDQRLLLPHWAKVVLENPEAAKYVHGIAVHWYLDFLAPAKWTLGETHRLFPNTTLFASEACVGSKFWEQSVRLGSWDRGMQYSHSIIENLLYHVVGWTDWNLALNPEGGPNWVRNFVDSPIIVDITKDTFYKQPMFYHLGHFSKFIPEGSTRVGLVASQKNDLDAVALLHPDGSSVVVVLNRSSKDVPLTIKDPAVGFLETISPGYSIHTYLWRRQ

SEQ ID NO: 1461 - DNA, 1608 bp, synthetic construct
  misc_feature 1..1608: note = Variant of B-Glucocerebrosidase
  source 1..1608: mol_type = other DNA
atggagttttcttctcctagtagagaagaatgccccaagccactgagcagggtgagcatcatggctggatccctcacagggctgcttcttttgcaggcagtctcatgggcctctggagccaggccctgtattcccaagtcattcggctactcctcagtggtgtgtgtatgcaatgccacctattgtgacagtgtcgatcctctcactctccctgctctgggtaccttctcccggtatgagagcacaagaagtggaagacgcatggagctctcaatgggccctatacaggctaaccgcactgggacaggtctgctgctgaccctccaacctgaacagaagtttcagaaagtcaagggatttggaggagccatgactgatgcagcagcactcaacatcttggccctgtctccaccagcccagaacctgctgttgaagtcctacttctcagaggaggggattgagtacaacatcatccgggttcccatggctagctgtgacttctccattaggacctatacatacgctgacacccccgatgattttcagctccataatttcagtctccctgaagaagacaccaaatggaagatacctctgattcacagagccttgcaactgtcccaaaggccagtgagcctcttcgcttctccctggactagtcctacatggctgaagactaatggtgcttacaatgggaagggctccctgaaaggacagccaggtgacatatatcatcagacatgggcccgctactttgtgaaattccttgatgcctatgcagagcacgggctccaattctgggcagtcaccgcagaaaacgagccctcagctgggctgctgtctggctacccctttcagtgcttgggctttactcctgagcatcaacgggacttcattgcccgggatttggggccaacactggccaacagcacccaccacaatgtaagactcctcattctggatgaccagaggctgctgctccctcattgggccaaggtggtgttgacaaacccagaagctgccaaatatgttcatggcatcgctgtccactggtacctggattttttggcccctgccaagtggactctgggagagacccacagactcttccccaataccacactgtttgcatcagaagcctgcgtggggagcaaattctgggagcagtctgttaggctgggttcctgggatcggggcatgcaatattcccatagtataatagagaacctcctctaccacgtggtaggatggacagactggaatctggctttgaacccagaaggaggccccaattgggtgcgcaactttgttgacagccccatcattgtggatatcacaaaggacaccttctacaaacagcctatgttctatcatctggggcactttagcaagttcattccagagggttccactagagtaggcttggttgcctcacagaagaatgatctggatgctgtggcactcctgcatcctgacgggagtgcagtggtggtagtactgaacaagtctagcaaagatgttcccttgactatcaaagacccagctgtgggctttctggaaaccatttcccctggatactctatccacacctatctctggagaagacag

SEQ ID NO: 1462 - protein, 536 aa, synthetic construct
  REGION 1..536: note = Variant of B-Glucocerebrosidase
MEFSSPSREECPKPLSRVSIMAGSLTGLLLLQAVSWASGARPCIPKSFGYSSVVCVCNATYCDSVDPLTLPALGTFSRYESTRSGRRMELSMGPIQANRTGTGLLLTLQPEQKFQKVKGFGGAMTDAAALNILALSPPAQNLLLKSYFSEEGIEYNIIRVPMASCDFSIRTYTYADTPDDFQLHNFSLPEEDTKWKIPLIHRALQLSQRPVSLFASPWTSPTWLKTNGAYNGKGSLKGQPGDIYHQTWARYFVKFLDAYAEHGLQFWAVTAENEPSAGLLSGYPFQCLGFTPEHQRDFIARDLGPTLANSTHHNVRLLILDDQRLLLPHWAKVVLTNPEAAKYVHGIAVHWYLDFLAPAKWTLGETHRLFPNTTLFASEACVGSKFWEQSVRLGSWDRGMQYSHSIIENLLYHVVGWTDWNLALNPEGGPNWVRNFVDSPIIVDITKDTFYKQPMFYHLGHFSKFIPEGSTRVGLVASQKNDLDAVALLHPDGSAVVVVLNKSSKDVPLTIKDPAVGFLETISPGYSIHTYLWRRQ

SEQ ID NO: 1463 - DNA, 1608 bp, synthetic construct
  misc_feature 1..1608: note = Variant of B-Glucocerebrosidase
  source 1..1608: mol_type = other DNA
atggagttttcttctcctagtagagaagaatgccccaagccactgagcagggtgagcatcatggctggatccctcacagggctgatacttttgcaggcagtctcatgggcctctggagccaggccctgtattcccaagtcattcggctactcctcagtggtgtgtgtatgcaatgccacctattgtgacagtgtcgatcctctcactctccctgctctgggtaccttctcccggtatgagagcacaagaagtggaagacgcatggagctctcaatgggccctatacaggctaaccgcactgggacaggtctgctgctgaccctccaacctgaacagaagtttcagaaagtcaagggatttggaggagccatgactgatgcagcagcactcaacatcttggccctgtctccaccagcccagaacctgctgttgaagtcctacttctcaaccgaggggattgagtacaacatcatccgggttcccatggctagctgtgacttctccattaggacctatacatacgctgacacccccgatgattttacactccataatttcagtctccctgaagaagacaccaaatggaagatacctctgattcacagagccttgcaactgtcccaaaggccagtgagcctcttcgcttctccctggactagtcctacatggctgaagactaatggtgcttacaatgggaagggctccctgaaaggacagccaggtgacatatatcatcagacatgggcccgctactttgtgaaattccttgatgcctatgcagagcaggggctccaattctgggcagtcaccgcagaaaacgagccctcagctgggctgctgtctggctacccctttcagtgcttgggctttactcctgagcatcaacgggacttcattgcccgggatttggggccaacactggccaacagcacccaccacaatgtaagactcctcattctggatgaccagaggctgctgctccctcattgggccaaggtggtgttgacaaacccagaagctgccaaatatgttcatggcatcgctgtccactggtacctggattttttggcccctgccaagtggactctgggagagacccacagactcttccccaataccacactgtttgcatcagaagcctgcgtggggagcaaattctgggagcagtctgttaggctgggttcctgggatcggggcatgcaatattcccatagtataatagagaacctcctctaccacgtggtaggatggacagactggaatctggctttgaacccagaaggaggccccaattgggtgcgcaactttgttgacagccccatcattgtggatatcacaaaggacaccttctacaaacagcctatgttctatcatatggggcactttagcaagttcattccagagggttccactagagtaggcttggttgcctcacagaagaatgatctggatgctgtggcactcctgcatcctgacgggagtggagtggtggtagtactgaacaggtctagcaaagatgttcccttgactatcaaagacccagctgtgggctttctggaaaccatttcccctggatactctatccacacctatctctggagaagacag

SEQ ID NO: 1464 - protein, 536 aa, synthetic construct
  REGION 1..536: note = Variant of B-Glucocerebrosidase
MEFSSPSREECPKPLSRVSIMAGSLTGLILLQAVSWASGARPCIPKSFGYSSVVCVCNATYCDSVDPLTLPALGTFSRYESTRSGRRMELSMGPIQANRTGTGLLLTLQPEQKFQKVKGFGGAMTDAAALNILALSPPAQNLLLKSYFSTEGIEYNIIRVPMASCDFSIRTYTYADTPDDFTLHNFSLPEEDTKWKIPLIHRALQLSQRPVSLFASPWTSPTWLKTNGAYNGKGSLKGQPGDIYHQTWARYFVKFLDAYAEQGLQFWAVTAENEPSAGLLSGYPFQCLGFTPEHQRDFIARDLGPTLANSTHHNVRLLILDDQRLLLPHWAKVVLTNPEAAKYVHGIAVHWYLDFLAPAKWTLGETHRLFPNTTLFASEACVGSKFWEQSVRLGSWDRGMQYSHSIIENLLYHVVGWTDWNLALNPEGGPNWVRNFVDSPIIVDITKDTFYKQPMFYHMGHFSKFIPEGSTRVGLVASQKNDLDAVALLHPDGSGVVVVLNRSSKDVPLTIKDPAVGFLETISPGYSIHTYLWRRQ

SEQ ID NO: 1465 - DNA, 1608 bp, synthetic construct
  misc_feature 1..1608: note = Variant of B-Glucocerebrosidase
  source 1..1608: mol_type = other DNA
atggagttttcttctcctagtagagaagaatgccccaagccactgagcagggtgagcatcatggctggatccctcacagggctgcttcttttgcaggcagtctcatgggcctctggagccaggccctgtattcccaagtcattcggctactcctcagtggtgtgtgtatgcaatgccacctattgtgacagtgtcgatcctctcactctccctgctctgggtaccttctcccggtatgagagcacaagaagtggaagacgcatggagctctcaatgggccctatacaggctaaccgcactgggaccggtctgctgctgaccctccaacctgaacagaagtttcagaaagtcaagggatttggaggagccatgactgatgcagcagcactcaacatcttggccctgtctccaccagcccagaacctgctgttgaagtcctacttctcagaggaggggattgagtacaacatcatccgggttcccatggctagctgtgacttctccattaggacctatacatacgctgacacccccgatgattttcagctccataatttcagtctccctgaagaagacaccaaatggaagatacctctgattcacagagccttgcaactgtcccaaaggccagtgagcctcttcgcttctccctggactagtcctacatggctgaagactaatggtgcttacaatgggaagggctccctgaaaggacagccaggtgacatatatcatcagacatgggcccgctactttgtgaaattccttgatgcctatgcagagcacgggctccaattctgggcagtcaccgcagaaaacgagccctcagctgggctgctgtctggctacccctttcagtgcttgggctttactcctgagcatcaacgggacttcattgcccgggatttggggccaacactggccaacagcacccaccacaatgtaagactcctcattctggatgaccagaggctgctgctccctcattgggccaaggtggtgttgacaaacccagaagctgccaaatatgttcatggcatcgctgtccactggtacctggattttttggcccctgccaagtggactctgggagagacccacagactcttccccaataccacactgtttgcatcagaagcctgcgtggggagcaaattctgggagcagtctgttaggctgggttcctgggatcggggcatgcaatattcccatagtataatagagaacctcctctaccacgtggtaggatggacagactggaatctggctttgaacccagaaggaggccccaattgggtgcgcaactttgttgacagccccatcattgtggatatcacaaaggacaccttctacaaacagcctatgttctatcatctggggcactttagcaagttcattccagagggttccactagagtaggcttggttgcctcacagaagaatgatctggatgctgtggcactcctgcatcctgacgggagtgcagtggtggtagtactgaacaagtctagcaaagatgttcccttgactatcaaagacccagctgtgggctttctggaaaccatttcccctggatactctatccacacctatgtctggagaagacag

SEQ ID NO: 1466 - protein, 536 aa, synthetic construct
  REGION 1..536: note = Variant of B-Glucocerebrosidase
MEFSSPSREECPKPLSRVSIMAGSLTGLLLLQAVSWASGARPCIPKSFGYSSVVCVCNATYCDSVDPLTLPALGTFSRYESTRSGRRMELSMGPIQANRTGTGLLLTLQPEQKFQKVKGFGGAMTDAAALNILALSPPAQNLLLKSYFSEEGIEYNIIRVPMASCDFSIRTYTYADTPDDFQLHNFSLPEEDTKWKIPLIHRALQLSQRPVSLFASPWTSPTWLKTNGAYNGKGSLKGQPGDIYHQTWARYFVKFLDAYAEHGLQFWAVTAENEPSAGLLSGYPFQCLGFTPEHQRDFIARDLGPTLANSTHHNVRLLILDDQRLLLPHWAKVVLTNPEAAKYVHGIAVHWYLDFLAPAKWTLGETHRLFPNTTLFASEACVGSKFWEQSVRLGSWDRGMQYSHSIIENLLYHVVGWTDWNLALNPEGGPNWVRNFVDSPIIVDITKDTFYKQPMFYHLGHFSKFIPEGSTRVGLVASQKNDLDAVALLHPDGSAVVVVLNKSSKDVPLTIKDPAVGFLETISPGYSIHTYVWRRQ

SEQ ID NO: 1467 - DNA, 1608 bp, synthetic construct
  misc_feature 1..1608: note = Variant of B-Glucocerebrosidase
  source 1..1608: mol_type = other DNA
atggagttttcttctcctagtagagaagaatgccccaagccactgagcagggtgagcatcatggctggatccctcacagggctgcttcttttgcaggcagtctcatgggcctctggagccaggccctgtattcccaagtcattcggctactcctcagtggtgtgtgtatgcaatgccacctattgtgacagtgtcgatcctctcactctccctgctctgggtaccttctcccggtatgagagcacaagaagtggaagacgcatggagctctcaatgggccctatacaggctaaccgcactgggacaggtctgctgctgaccctccaacctgaacagaagtttcagaaagtcaagggatttggaggagccatgactgatgcagcagcactcaacatcttggccctgtctccaccagcccagaacctgctgttgaagtcctacttctcagaggaggggattgagtacaacatcatccgggttcccatggctagctgtgacttctccattaggacctatacatacgctgacacccccgatgattttcagctccataatttcagtctccctgaagaagacaccaaatggaagatacctctgattcacagagccttgcaactgtcccaaaggccagtgagcctcttcgcttctccctggactagtcctacatggctgaagactaatggtgcttacaatgggaagggctccctgaaaggacagccaggtgacatatatcatcagacatgggcccgctactttgtgaaattccttgatgcctatgcagagcacgggctccaattctgggcagtcaccgcagaaaacgagccctcagctgggctgctgtctggctacccctttcagtgcttgggctttactcctgagcatcaacgggacttcattgcccgggatttggggccaacactggccaacagcacccaccacaatgtaagactcctcattctggatgaccagaggctgctgctccctcattgggccaaggtggtgttgacaaacccagaagctgccaaatatgttcatggcatcgctgtccactggtacctggattttttggcccctgccaagtggactctgggagagacccacagactcttccccaataccacactgtttgcatcagaagcctgcgtggggagcaaaccatgggagcagtctgttaggctgggttcctgggatcggggcatgcaatattcccatagtataatagagaacctcctctaccacgtggtaggatggacagactggaatctggctttgaacccagaaggaggccccaattgggtgcgcaactttgttgacagccccatcattgtggatatcacaaaggacaccttctacaaacagcctatgttctatcatctggggcactttagcaagttcattccagagggttccactagagtaggcttggttgcctcacagaagaatgatctggatgctgtggcactcctgcatcctgacgggagtgcagtggtggtagtactgaacaggtctagcaaagatgttcccttgactatcaaagacccagctgtgggctttctggaaaccatttcccctggatactctatccacacctatctctggagaagacag

SEQ ID NO: 1468 - protein, 536 aa, synthetic construct
  REGION 1..536: note = Variant of B-Glucocerebrosidase
MEFSSPSREECPKPLSRVSIMAGSLTGLLLLQAVSWASGARPCIPKSFGYSSVVCVCNATYCDSVDPLTLPALGTFSRYESTRSGRRMELSMGPIQANRTGTGLLLTLQPEQKFQKVKGFGGAMTDAAALNILALSPPAQNLLLKSYFSEEGIEYNIIRVPMASCDFSIRTYTYADTPDDFQLHNFSLPEEDTKWKIPLIHRALQLSQRPVSLFASPWTSPTWLKTNGAYNGKGSLKGQPGDIYHQTWARYFVKFLDAYAEHGLQFWAVTAENEPSAGLLSGYPFQCLGFTPEHQRDFIARDLGPTLANSTHHNVRLLILDDQRLLLPHWAKVVLTNPEAAKYVHGIAVHWYLDFLAPAKWTLGETHRLFPNTTLFASEACVGSKPWEQSVRLGSWDRGMQYSHSIIENLLYHVVGWTDWNLALNPEGGPNWVRNFVDSPIIVDITKDTFYKQPMFYHLGHFSKFIPEGSTRVGLVASQKNDLDAVALLHPDGSAVVVVLNRSSKDVPLTIKDPAVGFLETISPGYSIHTYLWRRQ

SEQ ID NO: 1469 - DNA, 1608 bp, synthetic construct
  misc_feature 1..1608: note = Variant of B-Glucocerebrosidase
  source 1..1608: mol_type = other DNA
atggagttttcttctcctagtagagaagaatgccccaagccactgagcagggtgagcatcatggctggatccctcacagggctgcttcttttgcaggcagtctcatgggcctctggagccaggccctgtattcccaagtcattcggctactcctcagtggtgtgtgtatgcaatgccacctattgtgacagtgtcgatcctctcactctccctgctctgggtaccttctcccggtatgagagcacaagaagtggaagacgcatggagctctcaatgggccctatacaggctaaccgcactgggacaggtctgctgctgaccctccaacctgaacagaagtttcagaaagtcaagggatttggaggagccatgactgatgcagcagcactcaacatcttggccctgtctccaccagcccagaacctgctgttgaagtcctacttctcagaggaggggattgagtacaacatcatccgggttcccatggctagctgtgacttctccattaggacctatacatacgctgacacccccgatgattttcagctccataatttcagtctccctgaagaagacaccaaatggaagatacctctgattcacagagccttgcaactgtcccaaaggccagtgagcctcttcgcttctccctggactagtcctacatggctgaagactaatggtgcttacaatgggaagggctccctgaaaggacagccaggtgacatatatcatcagacatgggcccgctactttgtgaaattccttgatgcctatgcagagcacgggctccaattctgggcagtcaccgcagaaaacgagccctcagctgggctgctgtctggctacccctttcagtgcttgggctttactcctgagcatcaacgggacttcattgcccgggatttggggccaacactggccaacagcacccaccacaatgtaagactcctcattctggatgaccagaggctgctgctccctcattgggccaaggtggtgttgacaaacccagaagctgccaaatatgttcatggcatcgctgtccactggtacctggattttttggcccctgccaagtggactctgggagagacccacagactcttccccaataccacactgtttgcatcagaagcctgcgtggggagcaaattctgggagcagtctgttaggctgggttcctgggatcggggcatgcaatattcccatagtataatagagaacctcctctaccacgtggtaggatggacagactggaatctggctttgaacccagaaggaggccccaattgggtgcgcaactttgttgacagccccatcattgtggatatcacaaaggacaccttctacaaacagcctatgttctatcatctggggcactttagcaagttcattccagagggttccactagagtaggcttggttgcctcacagaagaatgatctggatgctgtggcactcctgcatcctgacgggagtgcagtgatggtagtactgaacaggtctagcaaagatgttcccttgactatcaaagacccagctgtgggctttctggaaaccatttcccctggatactctatccacacctatctctggagaagacag

SEQ ID NO: 1470 - protein, 536 aa, synthetic construct
  REGION 1..536: note = Variant of B-Glucocerebrosidase
MEFSSPSREECPKPLSRVSIMAGSLTGLLLLQAVSWASGARPCIPKSFGYSSVVCVCNATYCDSVDPLTLPALGTFSRYESTRSGRRMELSMGPIQANRTGTGLLLTLQPEQKFQKVKGFGGAMTDAAALNILALSPPAQNLLLKSYFSEEGIEYNIIRVPMASCDFSIRTYTYADTPDDFQLHNFSLPEEDTKWKIPLIHRALQLSQRPVSLFASPWTSPTWLKTNGAYNGKGSLKGQPGDIYHQTWARYFVKFLDAYAEHGLQFWAVTAENEPSAGLLSGYPFQCLGFTPEHQRDFIARDLGPTLANSTHHNVRLLILDDQRLLLPHWAKVVLTNPEAAKYVHGIAVHWYLDFLAPAKWTLGETHRLFPNTTLFASEACVGSKFWEQSVRLGSWDRGMQYSHSIIENLLYHVVGWTDWNLALNPEGGPNWVRNFVDSPIIVDITKDTFYKQPMFYHLGHFSKFIPEGSTRVGLVASQKNDLDAVALLHPDGSAVMVVLNRSSKDVPLTIKDPAVGFLETISPGYSIHTYLWRRQ

SEQ ID NO: 1471 - DNA, 1608 bp, synthetic construct
  misc_feature 1..1608: note = Variant of B-Glucocerebrosidase
  source 1..1608: mol_type = other DNA
atggagttttcttctcctagtagagaagaatgccccaagccactgagcagggtgagcatcatggctggatccctcacagggctgcttcttttgcaggcagtctcatgggcctctggagccaggccctgtattcccaagtcattcggctactcctcagtggtgtgtgtatgcaatgccacctattgtgacagtgtcgatcctctcactctccctgctctgggtaccttctcccggtatgagagcacaagaagtggaagacgcatggagctctcaatgggccctatacaggctaacaagactgggacaggtctgctgctgaccctccaacctgaacagaagtttcagaaagtcaagggatttggaggagccatgactgatgcagcagcactcaacatcttggccctgtctccaccagcccagaacctgctgttgaagtcctacttctcagaggaggggattgagtacaacatcatccgggttcccatggctagctgtgacttctccattaggacctatacatacgctgacacccccgatgattttcagctccataatttcagtctccctgaagaagacaccaaatggaagatacctctgattcacagagccttgcaactgtcccaaaggccagtgagcctcttcgcttctccctggactagtcctacatggctgaagactaatggtgcttacaatgggaagggctccctgaaaggacagccaggtgacatatatcatcagacatgggcccgctactttgtgaaattccttgatgcctatgcagagcacgggctccaattctgggcagtcaccgcagaaaacgagccctcagctgggctgctgtctggctacccctttcagtgcttgggctttactcctgagcatcaacgggacttcattgcccgggatttggggccaacactggccaacagcacccaccacaatgtaagactcctcattctggatgaccagaggctgctgctccctcattgggccaaggtggtgttgacaaacccagaagctgccaaatatgttcatggcatcgctgtccactggtacctggattttttggcccctgccaagtggactctgggagagacccacagactcttccccaataccacactgtttgcatcagaagcctgcgtggggagcaaattctgggagcagtctgttaggctgggttcctgggatcggggcatgcaatattcccatagtataatagagaacctcctctaccacgtggtaggatggacagactggaatctggctttgaacccagaaggaggccccaattgggtgcgcaactttgttgacagccccatcattgtggatatcacaaaggacaccttctacaaacagcctatgttctatcatctggggcactttagcaagttcattccagagggttccactagagtaggcttggttgcctcacagaagaatgatctggatgctgtggcactcctgcatcctgacgggagtgcagtggtggtagtactgaacaggtctagcaaagatgttcccttgactatcaaagacccagctgtgggctttctggaaaccatttcccctggatactctatccacacctatctctggagaagacag

SEQ ID NO: 1472 - protein, 536 aa, synthetic construct
  REGION 1..536: note = Variant of B-Glucocerebrosidase
MEFSSPSREECPKPLSRVSIMAGSLTGLLLLQAVSWASGARPCIPKSFGYSSVVCVCNATYCDSVDPLTLPALGTFSRYESTRSGRRMELSMGPIQANKTGTGLLLTLQPEQKFQKVKGFGGAMTDAAALNILALSPPAQNLLLKSYFSEEGIEYNIIRVPMASCDFSIRTYTYADTPDDFQLHNFSLPEEDTKWKIPLIHRALQLSQRPVSLFASPWTSPTWLKTNGAYNGKGSLKGQPGDIYHQTWARYFVKFLDAYAEHGLQFWAVTAENEPSAGLLSGYPFQCLGFTPEHQRDFIARDLGPTLANSTHHNVRLLILDDQRLLLPHWAKVVLTNPEAAKYVHGIAVHWYLDFLAPAKWTLGETHRLFPNTTLFASEACVGSKFWEQSVRLGSWDRGMQYSHSIIENLLYHVVGWTDWNLALNPEGGPNWVRNFVDSPIIVDITKDTFYKQPMFYHLGHFSKFIPEGSTRVGLVASQKNDLDAVALLHPDGSAVVVVLNRSSKDVPLTIKDPAVGFLETISPGYSIHTYLWRRQ

SEQ ID NO: 1473 - DNA, 1608 bp, synthetic construct
  misc_feature 1..1608: note = Variant of B-Glucocerebrosidase
  source 1..1608: mol_type = other DNA
atggagttttcttctcctagtagagaagaatgccccaagccactgagcagggtgagcatcatggctggatccctcacagggctgcttcttttgcaggcagtctcatgggcctctggagccaggccctgtattcccaagtcattcggctactcctcagtggtgtgtgtatgcaatgccacctattgtgacagtgtcgatcctctcactctccctgctctgggtaccttctcccggtatgagagcacaagaagtggaagacgcatggagctctcaatgggccctatacaggctaaccgcactgggacaggtctgctgctgaccctccaacctgaacagaagtttcagaaagtcaagggatttggaggagccatgactgatgcagcagcactcaacatcttggccctgtctccaccagcccagaacctgctgttgaagtcctacttctcagaggaggggattgagtacaacatcatccgggttcccatggctagctgtgacttctccattaggacctatacatacgctgacacccccgatgattttcagctccataatttcagtctccctgaagaagacaccaaatggaagatacctctgattcacagagccttgcaactgtcccaaaggccagtgagcctcttcgcttctccctggactagtcctacatggctgaagactaatggtgcttacaatgggaagggctccctgaaaggacagccaggtgacatatatcatcagacatgggcccgctactttgtgaaattccttgatgcctatgcagagcacgggctccaattctgggcagtcaccgcagaaaacgagccctcagctgggctgctgtctggctacccctttcagtgcttgggctttactcctgagcatcaacgggacttcattgcccgggatttggggccaacactggccaacagcacccaccacaatgtaagactcctcattctggatgaccagaggctgctgctccctcattgggccaaggtggtgttgacaaacccagaagctgccaaatatgttcatggcatcgctgtccactggtacctggattttttggcccctgccaagtggactctgggagagacccacagactcttccccaataccacactgtttgcatcagaagcctgcgtggggagcaaattctgggagcagtctgttaggctgggttcctgggatcggggcatgcaatattcccatagtataatagagaacctcctctaccacgtggtaggatggacagactggaatctggctttgaacccagaaggaggccccaattgggtgcgcaactttgttgacagccccatcattgtggatatcacaaaggacaccttctacaaacagcctatgttctatcatctggggcactttagcaagttcattccagagggttccactagagtaggcttggttgcctcacagaagaatgatctggatgctgtggcactcctgcatcctgacgggagtgcagtggtggtagtactgaacaggtctagcaaagatgttcccttgactatccacgacccagctgtgggctttctggaaaccatttcccctggatactctatccacacctatctctggagaagacag

SEQ ID NO: 1474 - protein, 536 aa, synthetic construct
  REGION 1..536: note = Variant of B-Glucocerebrosidase
MEFSSPSREECPKPLSRVSIMAGSLTGLLLLQAVSWASGARPCIPKSFGYSSVVCVCNATYCDSVDPLTLPALGTFSRYESTRSGRRMELSMGPIQANRTGTGLLLTLQPEQKFQKVKGFGGAMTDAAALNILALSPPAQNLLLKSYFSEEGIEYNIIRVPMASCDFSIRTYTYADTPDDFQLHNFSLPEEDTKWKIPLIHRALQLSQRPVSLFASPWTSPTWLKTNGAYNGKGSLKGQPGDIYHQTWARYFVKFLDAYAEHGLQFWAVTAENEPSAGLLSGYPFQCLGFTPEHQRDFIARDLGPTLANSTHHNVRLLILDDQRLLLPHWAKVVLTNPEAAKYVHGIAVHWYLDFLAPAKWTLGETHRLFPNTTLFASEACVGSKFWEQSVRLGSWDRGMQYSHSIIENLLYHVVGWTDWNLALNPEGGPNWVRNFVDSPIIVDITKDTFYKQPMFYHLGHFSKFIPEGSTRVGLVASQKNDLDAVALLHPDGSAVVVVLNRSSKDVPLTIHDPAVGFLETISPGYSIHTYLWRRQ

SEQ ID NO: 1475 - DNA, 1608 bp, synthetic construct
  misc_feature 1..1608: note = Variant of B-Glucocerebrosidase
  source 1..1608: mol_type = other DNA
atggagttttcttctcctagtagagaagaatgccccaagccactgagcagggtgagcatcatggctggatccctcacagggctgcttcttttgcaggcagtctcatgggcctctggagccaggccctgtattcccaagtcattcggctactcctcagtggtgtgtgtatgcaatgccacctattgtgacagtgtcgatcctctcgacctccctgctctgggtaccttctcccggtatgagagcacaagaagtggaagacgcatggagctctcaatgggccctatacaggctaaccgcactgggacaggtctgctgctgaccctccaacctgaacagaagtttcagaaagtcaagggatttggaggagccatgactgatgcagcagcactcaacatcttggccctgtctccaccagcccagaacctgctgttgaagtcctacttctcagaggaggggattgagtacaacatcatccgggttcccatggctagctgtgacttctccattaggacctatacatacgctgacacccccgatgattttcagctccataatttcagtctccctgaagaagacaccaaatggaagatacctctgattcacagagccttgcaactgtcccaaaggccagtgagcctcttcgcttctccctggactagtcctacatggctgaagactaatggtgcttacaatgggaagggctccctgaaaggacagccaggtgacatatatcatcagacatgggcccgctactttgtgaaattccttgatgcctatgcagagcacgggctccaattctgggcagtcaccgcagaaaacgagccctcagctgggctgctgtctggctacccctttcagtgcttgggctttactcctgagcatcaacgggacttcattgcccgggatttggggccaacactggccaacagcacccaccacaatgtaagactcctcattctggatgaccagaggctgctgctccctcattgggccaaggtggtgttgacaaacccagaagctgccaaatatgttcatggcatcgctgtccactggtacctggattttttggcccctgccaagtggactctgggagagacccacagactcttccccaataccacactgtttgcatcagaagcctgcgtggggagcaaattctgggagcagtctgttaggctgggttcctgggatcggggcatgcaatattcccatagtataatagagaacctcctctaccacgtggtaggatggacagactggaatctggctttgaacccagaaggaggccccaattgggtgcgcaactttgttgacagccccatcattgtggatatcacaaaggacaccttctacaaacagcctatgttctatcatctggggcactttagcaagttcattccagagggttccactagagtaggcttggttgcctcacagaagaatgatctggatgctgtggcactcctgcatcctgacgggagtgcagtggtggtagtactgaacaggtctagcaaagatgttcccttgactatcaaagacccagctgtgggctttctggaaaccatttcccctggatactctatccacacctatctctggagaagacag

SEQ ID NO: 1476 - protein, 536 aa, synthetic construct
  REGION 1..536: note = Variant of B-Glucocerebrosidase
MEFSSPSREECPKPLSRVSIMAGSLTGLLLLQAVSWASGARPCIPKSFGYSSVVCVCNATYCDSVDPLDLPALGTFSRYESTRSGRRMELSMGPIQANRTGTGLLLTLQPEQKFQKVKGFGGAMTDAAALNILALSPPAQNLLLKSYFSEEGIEYNIIRVPMASCDFSIRTYTYADTPDDFQLHNFSLPEEDTKWKIPLIHRALQLSQRPVSLFASPWTSPTWLKTNGAYNGKGSLKGQPGDIYHQTWARYFVKFLDAYAEHGLQFWAVTAENEPSAGLLSGYPFQCLGFTPEHQRDFIARDLGPTLANSTHHNVRLLILDDQRLLLPHWAKVVLTNPEAAKYVHGIAVHWYLDFLAPAKWTLGETHRLFPNTTLFASEACVGSKFWEQSVRLGSWDRGMQYSHSIIENLLYHVVGWTDWNLALNPEGGPNWVRNFVDSPIIVDITKDTFYKQPMFYHLGHFSKFIPEGSTRVGLVASQKNDLDAVALLHPDGSAVVVVLNRSSKDVPLTIKDPAVGFLETISPGYSIHTYLWRRQ

SEQ ID NO: 1477 - DNA, 1608 bp, synthetic construct
  misc_feature 1..1608: note = Variant of B-Glucocerebrosidase
  source 1..1608: mol_type = other DNA
atggagttttcttctcctagtagagaagaatgccccaagccactgagcagggtgagcatcatggctggatccctcacagggctgcttcttttgcaggcagtctcatgggcctctggagccaggccctgtattcccaagtcattcggctactcctcagtggtgtgtgtatgcaatgccacctattgtgacagtgtcgatcctctcactctccctgctctgggtaccttctcccggtatgagagcacaagaagtggaagacgcatggagctctcaatgggccctatacaggctaaccgcactgggacaggtctgctgctgaccctccaacctgaacagaagtttcagaaagtcaagggatttggaggagccatgactgatgcagcagcactcaacatcttggccctgtctccaccagcccagaacctgctgttgaagtcctacttctcagaggaggggattgagtacaacatcatccgggttcccatggctagctgtgacttctccattaggacctatacatacgctgacacccccgatgattttcagctccataatttcagtctccctgaagaagacaccaaatggaagatacctctgattcacagagccttgcaactgtcccaaaggccagtgagcctcttcgcttctccctggactagtcctacatggctgaagactaatggtgcttacaatgggaagggctccctgaaaggacagccaggtgacatatatcatcagacatgggcccgctactttgtgaaattccttgatgcctatgcagagcacgggctccaattctgggcagtcaccgcagaaaacgagccctcagctgggctgctgtctggctacccctttcagtgcttgggctttactcctgagcatcaacgggacttcattgcccgggatttggggccaacactggccaacagcacccaccacaatgtaagactcctcattctggatgaccagaggctgctgctccctcattgggccaaggtggtgttgacaaacccagaagctgccaaatatgttcatggcatcgctgtccactggtacctggattttttggcccctgccaagtggactctgggagagacccacagactcttccccaataccacactgtttgcatcagaagcctgcgtggggagcaaattctgggagcagtctgttaggctgggttcctgggatcggggcatgcaatattcccatagtataatagagaacctcctctaccacgtggtaggatggacagactggaatctggctttgaacccagaaggaggccccaattgggtgcgcaactttgttgacagccccatcattgtggatatcacaaaggacaccttctacaaacagcctatgttctatcatctggggcactttagcaagttcattccagagggttccactagagtaggcttggttgcctcacagaagaatgatctggatgctgtggcactcctgcatcctgacgggagtgcagtggtggtagtactgaacaggtctagcaaagatatacccttgactatcaaagacccagctgtgggctttctggaaaccatttcccctggatactctatccacacctatctctggagaagacag

SEQ ID NO: 1478 - protein, 536 aa, synthetic construct
  REGION 1..536: note = Variant of B-Glucocerebrosidase
MEFSSPSREECPKPLSRVSIMAGSLTGLLLLQAVSWASGARPCIPKSFGYSSVVCVCNATYCDSVDPLTLPALGTFSRYESTRSGRRMELSMGPIQANRTGTGLLLTLQPEQKFQKVKGFGGAMTDAAALNILALSPPAQNLLLKSYFSEEGIEYNIIRVPMASCDFSIRTYTYADTPDDFQLHNFSLPEEDTKWKIPLIHRALQLSQRPVSLFASPWTSPTWLKTNGAYNGKGSLKGQPGDIYHQTWARYFVKFLDAYAEHGLQFWAVTAENEPSAGLLSGYPFQCLGFTPEHQRDFIARDLGPTLANSTHHNVRLLILDDQRLLLPHWAKVVLTNPEAAKYVHGIAVHWYLDFLAPAKWTLGETHRLFPNTTLFASEACVGSKFWEQSVRLGSWDRGMQYSHSIIENLLYHVVGWTDWNLALNPEGGPNWVRNFVDSPIIVDITKDTFYKQPMFYHLGHFSKFIPEGSTRVGLVASQKNDLDAVALLHPDGSAVVVVLNRSSKDIPLTIKDPAVGFLETISPGYSIHTYLWRRQ

SEQ ID NO: 1479 - DNA, 1608 bp, synthetic construct
  misc_feature 1..1608: note = Variant of B-Glucocerebrosidase
  source 1..1608: mol_type = other DNA
atggagttttcttctcctagtagagaagaatgccccaagccactgagcagggtgagcatcatggctggatccctcacagggctgcttcttttgcaggcagtctcatgggcctctggagccaggccctgtattcccaagtcattcggctactcctcagtggtgtgtgtatgcaatgccacctattgtgacagtgtcgatcctctcactctccctgctctgggtaccttctcccggtatgagagcacaagaagtggaagacgcatggagctctcaatgggccctatacaggctaaccgcactgggacaggtctgctgctgaccctccaacctgaacagaagtttcagaaagtcaagggatttggaggagccatgactgatgcagcagcactcaacatcttggccctgtctccaccagcccagaacctgctgttgaagtcctacttctcagaggaggggattgagtacaacatcatccgggttcccatggctagctgtgacttctccattaggacctatacatacgctgacacccccgatgattttcagctccataatttcagtctccctgaagaagacaccaaatggaagatacctctgattcacagagccttgcaactgtcccaaaggccagtgagcctcttcgcttctccctggactagtcctacatggctgaagactaatggtgcttacaatgggaagggctccctgaaaggacagccaggtgacatatatcatcagacatgggcccgctactttgtgaaattccttgatgcctatgcagagcacgggctccaattctgggcagtcaccgcagaaaacgagccctcagctgggctgctgtctggctacccctttcagtgcttgggctttactcctgagcatcaacgggacttcattgcccgggatttggggccaacactggccaacagcacccaccacaatgtaagactcctcattctggatgaccagaggctgctgctccctcattgggccaaggtggtgttgacaaacccagaagctgccaaatatgttcatggcatcgctgtccactggtacctggattttttggcccctgccaagtggactctgggagagacccacagactcttccccaataccacactgtttgcatcagaagcctgcgtggggagcaaattctgggagcagtctgttaggctgggttcctgggatcggggcatgcaatattcccatagtataatagagaacctcctctaccacgtggtaggatggacagactggaatctggctttgaacccagaaggaggccccaattgggtgcgcaactttgttgacagccccatcattgtggataacacaaaggacaccttctacaaacagcctatgttctatcatctggggcactttagcaagttcattccagagggttccactagagtaggcttggttgcctcacagaagaatgatctggatgctgtggcactcctgcatcctgacgggagtgcagtggtggtagtactgaacaggtctagcaaagatgttcccttgactatcaaagacccagctgtgggctttctggaaaccatttcccctggatactctatccacacctatctctggagaagacag

SEQ ID NO: 1480 - protein, 536 aa, synthetic construct
  REGION 1..536: note = Variant of B-Glucocerebrosidase
MEFSSPSREECPKPLSRVSIMAGSLTGLLLLQAVSWASGARPCIPKSFGYSSVVCVCNATYCDSVDPLTLPALGTFSRYESTRSGRRMELSMGPIQANRTGTGLLLTLQPEQKFQKVKGFGGAMTDAAALNILALSPPAQNLLLKSYFSEEGIEYNIIRVPMASCDFSIRTYTYADTPDDFQLHNFSLPEEDTKWKIPLIHRALQLSQRPVSLFASPWTSPTWLKTNGAYNGKGSLKGQPGDIYHQTWARYFVKFLDAYAEHGLQFWAVTAENEPSAGLLSGYPFQCLGFTPEHQRDFIARDLGPTLANSTHHNVRLLILDDQRLLLPHWAKVVLTNPEAAKYVHGIAVHWYLDFLAPAKWTLGETHRLFPNTTLFASEACVGSKFWEQSVRLGSWDRGMQYSHSIIENLLYHVVGWTDWNLALNPEGGPNWVRNFVDSPIIVDNTKDTFYKQPMFYHLGHFSKFIPEGSTRVGLVASQKNDLDAVALLHPDGSAVVVVLNRSSKDVPLTIKDPAVGFLETISPGYSIHTYLWRRQ

SEQ ID NO: 1481 - DNA, 1608 bp, synthetic construct
  misc_feature 1..1608: note = Variant of B-Glucocerebrosidase
  source 1..1608: mol_type = other DNA
atggagttttcttctcctagtagagaagaatgccccaagccactgagcagggtgagcatcatggctggatccctcacagggctgcttcttttgcaggcagtctcatgggcctctggagccaggccctgtattcccaagtcattcggctactcctcagtggtgtgtgtatgcaatgccacctattgtgacagtgtcgatcctctcactctccctgctctgggtaacttctcccggtatgagagcacaagaagtggaagacgcatggagctctcaatgggccctatacaggctaaccgcactgggacaggtctgctgctgaccctccaacctgaacagaagtttcagaaagtcaagggatttggaggagccatgactgatgcagcagcactcaacatcttggccctgtctccaccagcccagaacctgctgttgaagtcctacttctcagaggaggggattgagtacaacatcatccgggttcccatggctagctgtgacttctccattaggacctatacatacgctgacacccccgatgattttcagctccataatttcagtctccctgaagaagacaccaaatggaagatacctctgattcacagagccttgcaactgtcccaaaggccagtgagcctcttcgcttctccctggactagtcctacatggctgaagactaatggtgcttacaatgggaagggctccctgaaaggacagccaggtgacatatatcatcagacatgggcccgctactttgtgaaattccttgatgcctatgcagagcacgggctccaattctgggcagtcaccgcagaaaacgagccctcagctgggctgctgtctggctacccctttcagtgcttgggctttactcctgagcatcaacgggacttcattgcccgggatttggggccaacactggccaacagcacccaccacaatgtaagactcctcattctggatgaccagaggctgctgctccctcattgggccaaggtggtgttgacaaacccagaagctgccaaatatgttcatggcatcgctgtccactggtacctggattttttggcccctgccaagtggactctgggagagacccacagactcttccccaataccacactgtttgcatcagaagcctgcgtggggagcaaattctgggagcagtctgttaggctgggttcctgggatcggggcatgcaatattcccatagtataatagagaacctcctctaccacgtggtaggatggacagactggaatctggctttgaacccagaaggaggccccaattgggtgcgcaactttgttgacagccccatcattgtggatatcacaaaggacaccttctacaaacagcctatgttctatcatctggggcactttagcaagttcattccagagggttccactagagtaggcttggttgcctcacagaagaatgatctggatgctgtggcactcctgcatcctgacgggagtgcagtggtggtagtactgaacaggtctagcaaagatgttcccttgactatcaaagacccagctgtgggctttctggaaaccatttcccctggatactctatccacacctatctctggagaagacag

SEQ ID NO: 1482 - protein, 536 aa, synthetic construct
  REGION 1..536: note = Variant of B-Glucocerebrosidase
MEFSSPSREECPKPLSRVSIMAGSLTGLLLLQAVSWASGARPCIPKSFGYSSVVCVCNATYCDSVDPLTLPALGNFSRYESTRSGRRMELSMGPIQANRTGTGLLLTLQPEQKFQKVKGFGGAMTDAAALNILALSPPAQNLLLKSYFSEEGIEYNIIRVPMASCDFSIRTYTYADTPDDFQLHNFSLPEEDTKWKIPLIHRALQLSQRPVSLFASPWTSPTWLKTNGAYNGKGSLKGQPGDIYHQTWARYFVKFLDAYAEHGLQFWAVTAENEPSAGLLSGYPFQCLGFTPEHQRDFIARDLGPTLANSTHHNVRLLILDDQRLLLPHWAKVVLTNPEAAKYVHGIAVHWYLDFLAPAKWTLGETHRLFPNTTLFASEACVGSKFWEQSVRLGSWDRGMQYSHSIIENLLYHVVGWTDWNLALNPEGGPNWVRNFVDSPIIVDITKDTFYKQPMFYHLGHFSKFIPEGSTRVGLVASQKNDLDAVALLHPDGSAVVVVLNRSSKDVPLTIKDPAVGFLETISPGYSIHTYLWRRQ

SEQ ID NO: 1483 - DNA, 1608 bp, synthetic construct
  misc_feature 1..1608: note = Variant of B-Glucocerebrosidase
  source 1..1608: mol_type = other DNA
atggagttttcttctcctagtagagaagaatgccccaagccactgagcagggtgagcatcatggctggatccctcacagggctgcttcttttgcaggcagtctcatgggcctctggagccaggccctgtattcccaagtcattcggctactcctcagtggtgtgtgtatgcaatgccacctattgtgacagtgtcgatcctctcactctccctgctctgggtcacttctcccggtatgagagcacaagaagtggaagacgcatggagctctcaatgggccctatacaggctaaccgcactgggacaggtctgctgctgaccctccaacctgaacagaagtttcagaaagtcaagggatttggaggagccatgactgatgcagcagcactcaacatcttggccctgtctccaccagcccagaacctgctgttgaagtcctacttctcagaggaggggattgagtacaacatcatccgggttcccatggctagctgtgacttctccattaggacctatacatacgctgacacccccgatgattttcagctccataatttcagtctccctgaagaagacaccaaatggaagatacctctgattcacagagccttgcaactgtcccaaaggccagtgagcctcttcgcttctccctggactagtcctacatggctgaagactaatggtgcttacaatgggaagggctccctgaaaggacagccaggtgacatatatcatcagacatgggcccgctactttgtgaaattccttgatgcctatgcagagcacgggctccaattctgggcagtcaccgcagaaaacgagccctcagctgggctgctgtctggctacccctttcagtgcttgggctttactcctgagcatcaacgggacttcattgcccgggatttggggccaacactggccaacagcacccaccacaatgtaagactcctcattctggatgaccagaggctgctgctccctcattgggccaaggtggtgttgacaaacccagaagctgccaaatatgttcatggcatcgctgtccactggtacctggattttttggcccctgccaagtggactctgggagagacccacagactcttccccaataccacactgtttgcatcagaagcctgcgtggggagcaaattctgggagcagtctgttaggctgggttcctgggatcggggcatgcaatattcccatagtataatagagaacctcctctaccacgtggtaggatggacagactggaatctggctttgaacccagaaggaggccccaattgggtgcgcaactttgttgacagccccatcattgtggatatcacaaaggacaccttctacaaacagcctatgttctatcatctggggcactttagcaagttcattccagagggttccactagagtaggcttggttgcctcacagaagaatgatctggatgctgtggcactcctgcatcctgacgggagtgcagtggtggtagtactgaacaggtctagcaaagatgttcccttgactatcaaagacccagctgtgggctttctggaaaccatttcccctggatactctatccacacctatctctggagaagacag

SEQ ID NO: 1484 - protein, 536 aa, synthetic construct
  REGION 1..536: note = Variant of B-Glucocerebrosidase
MEFSSPSREECPKPLSRVSIMAGSLTGLLLLQAVSWASGARPCIPKSFGYSSVVCVCNATYCDSVDPLTLPALGHFSRYESTRSGRRMELSMGPIQANRTGTGLLLTLQPEQKFQKVKGFGGAMTDAAALNILALSPPAQNLLLKSYFSEEGIEYNIIRVPMASCDFSIRTYTYADTPDDFQLHNFSLPEEDTKWKIPLIHRALQLSQRPVSLFASPWTSPTWLKTNGAYNGKGSLKGQPGDIYHQTWARYFVKFLDAYAEHGLQFWAVTAENEPSAGLLSGYPFQCLGFTPEHQRDFIARDLGPTLANSTHHNVRLLILDDQRLLLPHWAKVVLTNPEAAKYVHGIAVHWYLDFLAPAKWTLGETHRLFPNTTLFASEACVGSKFWEQSVRLGSWDRGMQYSHSIIENLLYHVVGWTDWNLALNPEGGPNWVRNFVDSPIIVDITKDTFYKQPMFYHLGHFSKFIPEGSTRVGLVASQKNDLDAVALLHPDGSAVVVVLNRSSKDVPLTIKDPAVGFLETISPGYSIHTYLWRRQ

SEQ ID NO: 1485 - DNA, 1608 bp, synthetic construct
  misc_feature 1..1608: note = Variant of B-Glucocerebrosidase
  source 1..1608: mol_type = other DNA
atggagttttcttctcctagtagagaagaatgccccaagccactgagcagggtgagcatcatggctggatccctcacagggctgcttcttttgcaggcagtctcatgggcctctggagccaggccctgtattcccaagtcattcggctactcctcagtggtgtgtgtatgcaatgccacctattgtgacagtgtcgatcctctcactctccctgctctgggtaccttctcccggtatgagagcacaagaagtggaagacgcatggagctctcaatgggccctatacaggctaaccgcactgggacaggtctgctgctgaccctccaacctgaacagaagtttcagaaagtcaagggatttggaggagccatgactgatgcagcagcactcaacatcttggccctgtctccaccagcccagaacctgctgttgaagtcctacttctcagaggaggggattgagtacaacatcatccgggttcccatggctagctgtgacttctccattaggacctatacatacgctgacacccccgatgattttcagctccataatttcagtctccctgaagaagacaccaaatggaagatacctctgattcacagagccttgcaactgtcccaaaggccagtgagcctcttcgcttctccctggactagtcctacatggctgaagactaatggtgcttacaatgggaagggctccctgaaaggacagccaggtgacatatatcatcagacatgggcccgctactttgtgaaattccttgatgcctatgcagagcacgggctccaattctgggcagtcaccgcagaaaacgagccctcagctgggctgctgtctggctacccctttcagtgcttgggctttactcctgagcatcaacgggacttcattgcccgggatttggggccaacactggccaacagcacccaccacaatgtaagactcctcattctggatgaccagaggctgctgctccctcattgggccaaggtggtgttgacaaacccagaagctgccaaatatgttcatggcatcgctgtccactggtacctggattttttggcccctgccaagtggactctgggagagacccacagactcttccccaataccacactgtttgcatcagaagcctgcgtggggagcaaattctgggagcagtctgttaggctgggttcctgggatcggggcatgcaatattcccatagtataatagagaacctcctctaccacgtggtaggatggacagactggaatctggctttgaacccagaaggaggccccaattgggtgcgcaactttgttgacagccccatcattgtggatatcacaaaggacaccttctacaaacagcctatgttctatcatctggggcactttagcaagttcattccagagggttccactagagtaggcttggttgcctcacagaagaatgatctggatgctgtggcactcctgcatcctgacgggagtgcagtggtggtagtactgaacaggtctagcaaagatgttcccttgactatccaagacccagctgtgggctttctggaaaccatttcccctggatactctatccacacctatctctggagaagacag

SEQ ID NO: 1486 - protein, 536 aa, synthetic construct
  REGION 1..536: note = Variant of B-Glucocerebrosidase
MEFSSPSREECPKPLSRVSIMAGSLTGLLLLQAVSWASGARPCIPKSFGYSSVVCVCNATYCDSVDPLTLPALGTFSRYESTRSGRRMELSMGPIQANRTGTGLLLTLQPEQKFQKVKGFGGAMTDAAALNILALSPPAQNLLLKSYFSEEGIEYNIIRVPMASCDFSIRTYTYADTPDDFQLHNFSLPEEDTKWKIPLIHRALQLSQRPVSLFASPWTSPTWLKTNGAYNGKGSLKGQPGDIYHQTWARYFVKFLDAYAEHGLQFWAVTAENEPSAGLLSGYPFQCLGFTPEHQRDFIARDLGPTLANSTHHNVRLLILDDQRLLLPHWAKVVLTNPEAAKYVHGIAVHWYLDFLAPAKWTLGETHRLFPNTTLFASEACVGSKFWEQSVRLGSWDRGMQYSHSIIENLLYHVVGWTDWNLALNPEGGPNWVRNFVDSPIIVDITKDTFYKQPMFYHLGHFSKFIPEGSTRVGLVASQKNDLDAVALLHPDGSAVVVVLNRSSKDVPLTIQDPAVGFLETISPGYSIHTYLWRRQ

SEQ ID NO: 1487 - DNA, 1608 bp, synthetic construct
  misc_feature 1..1608: note = Variant of B-Glucocerebrosidase
  source 1..1608: mol_type = other DNA
atggagttttcttctcctagtagagaagaatgccccaagccactgagcagggtgagcatcatggctggatccctcacagggctgcttcttttgcaggcagtctcatgggcctctggagccaggccctgtattcccaagtcattcggctactcctcagtggtgtgtgtatgcaatgccacctattgtgacagtgtcgatcctctcactctccctgctctgggtaccttctcccggtatgagagcacaagaagtggaagacgcatggagctctcaatgggccctatacaggctaaccgcactgggacaggtctgctgctgaccctccaacctgaacagaagtttcagaaagtcaagggatttggaggagccatgactgatgcagcagcactcaacatcttggccctgtctccaccagcccagaacctgctgttgaagtcctacttctcagaggaggggattgagtacaacatcatccgggttcccatggctagctgtgacttctccattaggacctatacatacgctgacacccccgatgattttcagctccataatttcagtctccctgaagaagacaccaaatggaagatacctctgattcacagagccttgcaactgtcccaaaggccagtgagcctcttcgcttctccctggactagtcctacatggctgaagactaatggtgcttacaatgggaagggctccctgaaaggacagccaggtgacatatatcatcagacatgggcccgctactttgtgaaattccttgatgcctatgcagagcacgggctccaattctgggcagtcaccgcagaaaacgagccctcagctgggctgctgtctggctacccctttcagtgcttgggctttactcctgagcatcaacgggacttcattgcccgggatttggggccaacactggccaacagcacccaccacaatgtaagactcctcattctggatgaccagaggctgctgctccctcattgggccaaggtggtgttgacaaacccagaagctgccaaatatgttcatggcatcgctgtccactggtacctggattttttggcccctgccaagtggactctgggagagacccacagactcttccccaataccacactgtttgcatcagaagcctgcgtggggagcaaattctgggagcagtctgttaggctgggttcctgggatcggggcatgcaatattcccatagtataatagagaacctcctctaccacgtggtaggatggacagactggaatctggctttgaacccagaaggaggccccaattgggtgcgcaactttgttgacagccccatcattgtggatatcacaaaggacaccttctacaaacagcctatgttctatcatctggggcactttagcaagttcattccagagggttccactagagtaggcttggttgcctcacagaagaatgatctggatgctgtgagcctcctgcatcctgacgggagtgcagtggtggtagtactgaacaggtctagcaaagatgttcccttgactatcaaagacccagctgtgggctttctggaaaccatttcccctggatactctatccacacctatctctggagaagacag

SEQ ID NO: 1488 - protein, 536 aa, synthetic construct
  REGION 1..536: note = Variant of B-Glucocerebrosidase
MEFSSPSREECPKPLSRVSIMAGSLTGLLLLQAVSWASGARPCIPKSFGYSSVVCVCNATYCDSVDPLTLPALGTFSRYESTRSGRRMELSMGPIQANRTGTGLLLTLQPEQKFQKVKGFGGAMTDAAALNILALSPPAQNLLLKSYFSEEGIEYNIIRVPMASCDFSIRTYTYADTPDDFQLHNFSLPEEDTKWKIPLIHRALQLSQRPVSLFASPWTSPTWLKTNGAYNGKGSLKGQPGDIYHQTWARYFVKFLDAYAEHGLQFWAVTAENEPSAGLLSGYPFQCLGFTPEHQRDFIARDLGPTLANSTHHNVRLLILDDQRLLLPHWAKVVLTNPEAAKYVHGIAVHWYLDFLAPAKWTLGETHRLFPNTTLFASEACVGSKFWEQSVRLGSWDRGMQYSHSIIENLLYHVVGWTDWNLALNPEGGPNWVRNFVDSPIIVDITKDTFYKQPMFYHLGHFSKFIPEGSTRVGLVASQKNDLDAVSLLHPDGSAVVVVLNRSSKDVPLTIKDPAVGFLETISPGYSIHTYLWRRQ

SEQ ID NO: 1489 - DNA, 1608 bp, synthetic construct
  misc_feature 1..1608: note = Variant of B-Glucocerebrosidase
  source 1..1608: mol_type = other DNA
atggagttttcttctcctagtagagaagaatgccccaagccactgagcagggtgagcatcatggctggatccctcacagggctgcttcttttgcaggcagtctcatgggcctctggagccaggccctgtattcccaagtcattcggctactcctcagtggtgtgtgtatgcaatgccacctattgtgacagtgtcgatcctctcactctccctgctctgggtaccttctcccggtatgagagcacaagaagtggaagacgcatggagctctcaatgggccctatacaggctaaccgcactgggacaggtctgctgctgaccctccaacctgaacagccttttcagaaagtcaagggatttggaggagccatgactgatgcagcagcactcaacatcttggccctgtctccaccagcccagaacctgctgttgaagtcctacttctcagaggaggggattgagtacaacatcatccgggttcccatggctagctgtgacttctccattaggacctatacatacgctgacacccccgatgattttcagctccataatttcagtctccctgaagaagacaccaaatggaagatacctctgattcacagagccttgcaactgtcccaaaggccagtgagcctcttcgcttctccctggactagtcctacatggctgaagactaatggtgcttacaatgggaagggctccctgaaaggacagccaggtgacatatatcatcagacatgggcccgctactttgtgaaattccttgatgcctatgcagagcacgggctccaattctgggcagtcaccgcagaaaacgagccctcagctgggctgctgtctggctacccctttcagtgcttgggctttactcctgagcatcaacgggacttcattgcccgggatttggggccaacactggccaacagcacccaccacaatgtaagactcctcattctggatgaccagaggctgctgctccctcattgggccaaggtggtgttgacaaacccagaagctgccaaatatgttcatggcatcgctgtccactggtacctggattttttggcccctgccaagtggactctgggagagacccacagactcttccccaataccacactgtttgcatcagaagcctgcgtggggagcaaattctgggagcagtctgttaggctgggttcctgggatcggggcatgcaatattcccatagtataatagagaacctcctctaccacgtggtaggatggacagactggaatctggctttgaacccagaaggaggccccaattgggtgcgcaactttgttgacagccccatcattgtggatatcacaaaggacaccttctacaaacagcctatgttctatcatctggggcactttagcaagttcattccagagggttccactagagtaggcttggttgcctcacagaagaatgatctggatgctgtggcactcctgcatcctgacgggagtgcagtggtggtagtactgaacaggtctagcaaagatgttcccttgactatcaaagacccagctgtgggctttctggaaaccatttcccctggatactctatccacacctatctctggagaagacag

SEQ ID NO: 1490 - protein, 536 aa, synthetic construct
  REGION 1..536: note = Variant of B-Glucocerebrosidase
MEFSSPSREECPKPLSRVSIMAGSLTGLLLLQAVSWASGARPCIPKSFGYSSVVCVCNATYCDSVDPLTLPALGTFSRYESTRSGRRMELSMGPIQANRTGTGLLLTLQPEQPFQKVKGFGGAMTDAAALNILALSPPAQNLLLKSYFSEEGIEYNIIRVPMASCDFSIRTYTYADTPDDFQLHNFSLPEEDTKWKIPLIHRALQLSQRPVSLFASPWTSPTWLKTNGAYNGKGSLKGQPGDIYHQTWARYFVKFLDAYAEHGLQFWAVTAENEPSAGLLSGYPFQCLGFTPEHQRDFIARDLGPTLANSTHHNVRLLILDDQRLLLPHWAKVVLTNPEAAKYVHGIAVHWYLDFLAPAKWTLGETHRLFPNTTLFASEACVGSKFWEQSVRLGSWDRGMQYSHSIIENLLYHVVGWTDWNLALNPEGGPNWVRNFVDSPIIVDITKDTFYKQPMFYHLGHFSKFIPEGSTRVGLVASQKNDLDAVALLHPDGSAVVVVLNRSSKDVPLTIKDPAVGFLETISPGYSIHTYLWRRQ

SEQ ID NO: 1491 - DNA, 1608 bp, synthetic construct
  misc_feature 1..1608: note = Variant of B-Glucocerebrosidase
  source 1..1608: mol_type = other DNA
atggagttttcttctcctagtagagaagaatgccccaagccactgagcagggtgagcatcatggctggatccctcacagggctgcttcttttgcaggcagtctcatgggcctctggagccaggccctgtattcccaagtcattcggctactcctcagtggtgtgtgtatgcaatgccacctattgtgacagtgtcgatcctctcactctccctgctctgggtaccttctcccggtatgagagcacaagaagtggaagacgcatggagctctcaatgggccctatacaggctaaccgcactgggacaggtctgctgctgaccctccaacctgaacagaagtttcagaaagtcaagggatttggaggagccatgactgatgcagcagcactcaacatcttggccctgtctccaccagcccagaacctgctgttgaagtcctacttctcagaggaggggattgagtacaacatcatccgggttcccatggctagctgtgacttctccattaggacctatacatacgctgacacccccgatgattttcagctcatcaatttcagtctccctgaagaagacaccaaatggaagatacctctgattcacagagccttgcaactgtcccaaaggccagtgagcctcttcgcttctccctggactagtcctacatggctgaagactaatggtgcttacaatgggaagggctccctgaaaggacagccaggtgacatatatcatcagacatgggcccgctactttgtgaaattccttgatgcctatgcagagcacgggctccaattctgggcagtcaccgcagaaaacgagccctcagctgggctgctgtctggctacccctttcagtgcttgggctttactcctgagcatcaacgggacttcattgcccgggatttggggccaacactggccaacagcacccaccacaatgtaagactcctcattctggatgaccagaggctgctgctccctcattgggccaaggtggtgttgacaaacccagaagctgccaaatatgttcatggcatcgctgtccactggtacctggattttttggcccctgccaagtggactctgggagagacccacagactcttccccaataccacactgtttgcatcagaagcctgcgtggggagcaaattctgggagcagtctgttaggctgggttcctgggatcggggcatgcaatattcccatagtataatagagaacctcctctaccacgtggtaggatggacagactggaatctggctttgaacccagaaggaggccccaattgggtgcgcaactttgttgacagccccatcattgtggatatcacaaaggacaccttctacaaacagcctatgttctatcatctggggcactttagcaagttcattccagagggttccactagagtaggcttggttgcctcacagaagaatgatctggatgctgtggcactcctgcatcctgacgggagtgcagtggtggtagtactgaacaggtctagcaaagatgttcccttgactatcaaagacccagctgtgggctttctggaaaccatttcccctggatactctatccacacctatctctggagaagacag

SEQ ID NO: 1492 - protein, 536 aa, synthetic construct
  REGION 1..536: note = Variant of B-Glucocerebrosidase
MEFSSPSREECPKPLSRVSIMAGSLTGLLLLQAVSWASGARPCIPKSFGYSSVVCVCNATYCDSVDPLTLPALGTFSRYESTRSGRRMELSMGPIQANRTGTGLLLTLQPEQKFQKVKGFGGAMTDAAALNILALSPPAQNLLLKSYFSEEGIEYNIIRVPMASCDFSIRTYTYADTPDDFQLINFSLPEEDTKWKIPLIHRALQLSQRPVSLFASPWTSPTWLKTNGAYNGKGSLKGQPGDIYHQTWARYFVKFLDAYAEHGLQFWAVTAENEPSAGLLSGYPFQCLGFTPEHQRDFIARDLGPTLANSTHHNVRLLILDDQRLLLPHWAKVVLTNPEAAKYVHGIAVHWYLDFLAPAKWTLGETHRLFPNTTLFASEACVGSKFWEQSVRLGSWDRGMQYSHSIIENLLYHVVGWTDWNLALNPEGGPNWVRNFVDSPIIVDITKDTFYKQPMFYHLGHFSKFIPEGSTRVGLVASQKNDLDAVALLHPDGSAVVVVLNRSSKDVPLTIKDPAVGFLETISPGYSIHTYLWRRQ

SEQ ID NO: 1493 - DNA, 1608 bp, synthetic construct
  misc_feature 1..1608: note = Variant of B-Glucocerebrosidase
  source 1..1608: mol_type = other DNA
atggagttttcttctcctagtagagaagaatgccccaagccactgagcagggtgagcatcatggctggatccctcacagggctgcttcttttgcaggcagtctcatgggcctctggagccaggccctgtattcccaagtcattcggctactcctcagtggtgtgtgtatgcaatgccacctattgtgacagtgtcgatcctctcactctccctgctctgggtaccttctcccggtatgagagcacaagaagtggaagacgcatggagatgtcaatgggccctatacaggctaaccgcactgggacaggtctgctgctgaccctccaacctgaacagaagtttcagaaagtcaagggatttggaggagccatgactgatgcagcagcactcaacatcttggccctgtctccaccagcccagaacctgctgttgaagtcctacttctcagaggaggggattgagtacaacatcatccgggttcccatggctagctgtgacttctccattaggacctatacatacgctgacacccccgatgattttcagctccataatttcagtctccctgaagaagacaccaaatggaagatacctctgattcacagagccttgcaactgtcccaaaggccagtgagcctcttcgcttctccctggactagtcctacatggctgaagactaatggtgcttacaatgggaagggctccctgaaaggacagccaggtgacatatatcatcagacatgggcccgctactttgtgaaattccttgatgcctatgcagagcacgggctccaattctgggcagtcaccgcagaaaacgagccctcagctgggctgctgtctggctacccctttcagtgcttgggctttactcctgagcatcaacgggacttcattgcccgggatttggggccaacactggccaacagcacccaccacaatgtaagactcctcattctggatgaccagaggctgctgctccctcattgggccaaggtggtgttgacaaacccagaagctgccaaatatgttcatggcatcgctgtccactggtacctggattttttggcccctgccaagtggactctgggagagacccacagactcttccccaataccacactgtttgcatcagaagcctgcgtggggagcaaattctgggagcagtctgttaggctgggttcctgggatcggggcatgcaatattcccatagtataatagagaacctcctctaccacgtggtaggatggacagactggaatctggctttgaacccagaaggaggccccaattgggtgcgcaactttgttgacagccccatcattgtggatatcacaaaggacaccttctacaaacagcctatgttctatcatctggggcactttagcaagttcattccagagggttccactagagtaggcttggttgcctcacagaagaatgatctggatgctgtggcactcctgcatcctgacgggagtgcagtggtggtagtactgaacaggtctagcaaagatgttcccttgactatcaaagacccagctgtgggctttctggaaaccatttcccctggatactctatccacacctatctctggagaagacag

SEQ ID NO: 1494 - protein, 536 aa, synthetic construct
  REGION 1..536: note = Variant of B-Glucocerebrosidase
MEFSSPSREECPKPLSRVSIMAGSLTGLLLLQAVSWASGARPCIPKSFGYSSVVCVCNATYCDSVDPLTLPALGTFSRYESTRSGRRMEMSMGPIQANRTGTGLLLTLQPEQKFQKVKGFGGAMTDAAALNILALSPPAQNLLLKSYFSEEGIEYNIIRVPMASCDFSIRTYTYADTPDDFQLHNFSLPEEDTKWKIPLIHRALQLSQRPVSLFASPWTSPTWLKTNGAYNGKGSLKGQPGDIYHQTWARYFVKFLDAYAEHGLQFWAVTAENEPSAGLLSGYPFQCLGFTPEHQRDFIARDLGPTLANSTHHNVRLLILDDQRLLLPHWAKVVLTNPEAAKYVHGIAVHWYLDFLAPAKWTLGETHRLFPNTTLFASEACVGSKFWEQSVRLGSWDRGMQYSHSIIENLLYHVVGWTDWNLALNPEGGPNWVRNFVDSPIIVDITKDTFYKQPMFYHLGHFSKFIPEGSTRVGLVASQKNDLDAVALLHPDGSAVVVVLNRSSKDVPLTIKDPAVGFLETISPGYSIHTYLWRRQ

SEQ ID NO: 1495 - DNA, 1608 bp, synthetic construct
  misc_feature 1..1608: note = Variant of B-Glucocerebrosidase
  source 1..1608: mol_type = other DNA
atggagttttcttctcctagtagagaagaatgccccaagccactgagcagggtgagcatcatggctggatccctcacagggctgcttcttttgcaggcagtctcatgggcctctggagccaggccctgtattcccaagtcattcggctactcctcagtggtgtgtgtatgcaatgccacctattgtgacagtgtcgatcctctcactctccctgctctgggtaccttctcccggtatgagagcacaagaagtggaagacgcatggagctctcaatgggccctatacaggctaaccgcactgggacaggtctgctgctgaccctccaacctgaacagaagtttcagaaagtcaagggatttggaggagccatgactgatgcagcagcactcaacatcttggccctgtctccaccagcccagaacctgctgttgaagtcctacttctcagaggaggggattgagtacaacatcatccgggttcccatggctagctgtgacttctccattaggacctatacatacgctgacacccccgatgattttcagctccataatttcagtctccctgaagaagacaccaaatggaagatacctctgattcacagagccttgcaactgtcccaaaggccagtgagcctcttcgcttctccctggactagtcctacatggctgaagactaatggtgcttacaatgggaagggcacactgaaaggacagccaggtgacatatatcatcagacatgggcccgctactttgtgaaattccttgatgcctatgcagagcacgggctccaattctgggcagtcaccgcagaaaacgagccctcagctgggctgctgtctggctacccctttcagtgcttgggctttactcctgagcatcaacgggacttcattgcccgggatttggggccaacactggccaacagcacccaccacaatgtaagactcctcattctggatgaccagaggctgctgctccctcattgggccaaggtggtgttgacaaacccagaagctgccaaatatgttcatggcatcgctgtccactggtacctggattttttggcccctgccaagtggactctgggagagacccacagactcttccccaataccacactgtttgcatcagaagcctgcgtggggagcaaattctgggagcagtctgttaggctgggttcctgggatcggggcatgcaatattcccatagtataatagagaacctcctctaccacgtggtaggatggacagactggaatctggctttgaacccagaaggaggccccaattgggtgcgcaactttgttgacagccccatcattgtggatatcacaaaggacaccttctacaaacagcctatgttctatcatctggggcactttagcaagttcattccagagggttccactagagtaggcttggttgcctcacagaagaatgatctggatgctgtggcactcctgcatcctgacgggagtgcagtggtggtagtactgaacaggtctagcaaagatgttcccttgactatcaaagacccagctgtgggctttctggaaaccatttcccctggatactctatccacacctatctctggagaagacag

SEQ ID NO: 1496 - protein, 536 aa, synthetic construct
  REGION 1..536: note = Variant of B-Glucocerebrosidase
MEFSSPSREECPKPLSRVSIMAGSLTGLLLLQAVSWASGARPCIPKSFGYSSVVCVCNATYCDSVDPLTLPALGTFSRYESTRSGRRMELSMGPIQANRTGTGLLLTLQPEQKFQKVKGFGGAMTDAAALNILALSPPAQNLLLKSYFSEEGIEYNIIRVPMASCDFSIRTYTYADTPDDFQLHNFSLPEEDTKWKIPLIHRALQLSQRPVSLFASPWTSPTWLKTNGAYNGKGTLKGQPGDIYHQTWARYFVKFLDAYAEHGLQFWAVTAENEPSAGLLSGYPFQCLGFTPEHQRDFIARDLGPTLANSTHHNVRLLILDDQRLLLPHWAKVVLTNPEAAKYVHGIAVHWYLDFLAPAKWTLGETHRLFPNTTLFASEACVGSKFWEQSVRLGSWDRGMQYSHSIIENLLYHVVGWTDWNLALNPEGGPNWVRNFVDSPIIVDITKDTFYKQPMFYHLGHFSKFIPEGSTRVGLVASQKNDLDAVALLHPDGSAVVVVLNRSSKDVPLTIKDPAVGFLETISPGYSIHTYLWRRQ

SEQ ID NO: 1497 - DNA, 1608 bp, synthetic construct
  misc_feature 1..1608: note = Variant of B-Glucocerebrosidase
  source 1..1608: mol_type = other DNA
atggagttttcttctcctagtagagaagaatgccccaagccactgagcagggtgagcatcatggctggatccctcacagggctgcttcttttgcaggcagtctcatgggcctctggagccaggccctgtattcccaagtcattcggctactcctcagtggtgtgtgtatgcaatgccacctattgtgacagtgtcgatcctctcactctccctgctctgggtaccttctcccggtatgagagcacaagaagtggaagacgcatggagctctcaatgggccctatacaggctaaccgcactgggacaggtctgctgctgaccctccaacctgaacagaagtttcagaaagtcaagggatttggaggagccatgactgatgcagcagcactcaacatcttggccctgtctccaccagcccagaacctgctgttgaagtcctacttctcagaggaggggattgagtacaacatcatccgggttcccatggctagctgtgacttctccattaggacctatacatacgctgacacccccgatgattttcagctccataatttcagtctccctgaagaagacaccaaatggaagatacctctgattcacagagccttgcaactgtcccaaaggccagtgagcctcttcgcttctccctggactagtcctacatggctgaagactaatggtgcttacaatgggaagggctccctgaaaggacagccaggtgacatatatcatcagacatgggcccgctactttgtgaaattccttgatgcctatgcagagcacgggctccaattctgggcagtcaccgcagaaaacgagccctcagctgggctgctgtctggctacccctttcagtgcttgggctttactcctgagcatcaacgggacttcattgcccgggatttggggccaacactggccaacagcacccaccacaatgtaagactcctcattctggatgaccagaggctgctgctccctcattgggccaaggtggtgttgacaaacccagaagctgccaaatatgttcatggcatcgctgtccactggtacctggattttttggcccctgccaagtggactctgggagagacccacagactcttccccaataccacactgtttgcatcagaagcctgcgtggggagcaaattctgggagcagtctgttaggctgggttcctgggatcggggcatgcaatattcccatagtataatagagaacctcctctaccacgtggtaggatggacagactggaatctggctttgaacccagaaggaggccccaattgggtgcagaactttgttgacagccccatcattgtggatatcacaaaggacaccttctacaaacagcctatgttctatcatctggggcactttagcaagttcattccagagggttccactagagtaggcttggttgcctcacagaagaatgatctggatgctgtggcactcctgcatcctgacgggagtgcagtggtggtagtactgaacaggtctagcaaagatgttcccttgactatcaaagacccagctgtgggctttctggaaaccatttcccctggatactctatccacacctatctctggagaagacag

SEQ ID NO: 1498 - protein, 536 aa, synthetic construct
  REGION 1..536: note = Variant of B-Glucocerebrosidase
MEFSSPSREECPKPLSRVSIMAGSLTGLLLLQAVSWASGARPCIPKSFGYSSVVCVCNATYCDSVDPLTLPALGTFSRYESTRSGRRMELSMGPIQANRTGTGLLLTLQPEQKFQKVKGFGGAMTDAAALNILALSPPAQNLLLKSYFSEEGIEYNIIRVPMASCDFSIRTYTYADTPDDFQLHNFSLPEEDTKWKIPLIHRALQLSQRPVSLFASPWTSPTWLKTNGAYNGKGSLKGQPGDIYHQTWARYFVKFLDAYAEHGLQFWAVTAENEPSAGLLSGYPFQCLGFTPEHQRDFIARDLGPTLANSTHHNVRLLILDDQRLLLPHWAKVVLTNPEAAKYVHGIAVHWYLDFLAPAKWTLGETHRLFPNTTLFASEACVGSKFWEQSVRLGSWDRGMQYSHSIIENLLYHVVGWTDWNLALNPEGGPNWVQNFVDSPIIVDITKDTFYKQPMFYHLGHFSKFIPEGSTRVGLVASQKNDLDAVALLHPDGSAVVVVLNRSSKDVPLTIKDPAVGFLETISPGYSIHTYLWRRQ

SEQ ID NO: 1499 - DNA, 1608 bp, synthetic construct
  misc_feature 1..1608: note = Variant of B-Glucocerebrosidase
  source 1..1608: mol_type = other DNA
atggagttttcttctcctagtagagaagaatgccccaagccactgagcagggtgagcatcatggctggatccctcacagggctgcttcttttgcaggcagtctcatgggcctctggagccaggccctgtattcccaagtcattcggctactcctcagtggtgtgtgtatgcaatgccacctattgtgacagtgtcgatcctctcactctccctgctctgggtaccttctcccggtatgagagcacaagaagtggaagacgcatggagctctcaatgggccctatacaggctaaccgcactgggacaggtctgctgctgaccctccaacctgaacagaagtttcagaaagtcaagggatttggaggagccatgactgatgcagcagcactcaacatcttggccctgtctccaccagcccagaacctgctgttgaagtcctacttctcagaggaggggattgagtacaacatcatccgggttcccatggctagctgtgacttctccattaggacctatacatacgctgacacccccgatgattttcagctccataatttcagtctccctgaagaagacaccaaatggaagatacctctgattcacagagccttgcaactgtcccaaaggccagtgagcctcttcgcttctccctggactagtcctacatggctgaagactaatggtgcttacaatgggaagggctccctgaaaggacagccaggtgacatatatcatcagacatgggcccgctactttgtgaaattccttgatgcctatgcagagcacgggctccaattctgggcagtcaccgcagaaaacgagccctcagctgggctgctgtctggctacccctttcagtgcttgggctttactcctgagcatcaacgggacttcattgcccgggatttggggccaacactggccaacagcacccaccacaatgtaagactcctcattctggatgaccagaggctgctgctccctcattgggccaaggtggtgttgacaaacccagaagctgccaaatatgttcatggcatcgctgtccactggtacctggattttttggcccctgccaagtggactctgggagagacccacagactcttccccaataccacactgtttgcatcagaagcctgcgtggggagcaaattctgggagcagtctgttaggctgggttcctgggatcggggcatgcaatattcccatagtataatagagaacctcctctaccacgtggtaggatggacagactggaatctggctttgaacccagaaggaggccccaattgggtgcgcaactttgttgacagccccatcattgtggatggaacaaaggacaccttctacaaacagcctatgttctatcatctggggcactttagcaagttcattccagagggttccactagagtaggcttggttgcctcacagaagaatgatctggatgctgtggcactcctgcatcctgacgggagtgcagtggtggtagtactgaacaggtctagcaaagatgttcccttgactatcaaagacccagctgtgggctttctggaaaccatttcccctggatactctatccacacctatctctggagaagacag

SEQ ID NO: 1500 - protein, 536 aa, synthetic construct
  REGION 1..536: note = Variant of B-Glucocerebrosidase
MEFSSPSREECPKPLSRVSIMAGSLTGLLLLQAVSWASGARPCIPKSFGYSSVVCVCNATYCDSVDPLTLPALGTFSRYESTRSGRRMELSMGPIQANRTGTGLLLTLQPEQKFQKVKGFGGAMTDAAALNILALSPPAQNLLLKSYFSEEGIEYNIIRVPMASCDFSIRTYTYADTPDDFQLHNFSLPEEDTKWKIPLIHRALQLSQRPVSLFASPWTSPTWLKTNGAYNGKGSLKGQPGDIYHQTWARYFVKFLDAYAEHGLQFWAVTAENEPSAGLLSGYPFQCLGFTPEHQRDFIARDLGPTLANSTHHNVRLLILDDQRLLLPHWAKVVLTNPEAAKYVHGIAVHWYLDFLAPAKWTLGETHRLFPNTTLFASEACVGSKFWEQSVRLGSWDRGMQYSHSIIENLLYHVVGWTDWNLALNPEGGPNWVRNFVDSPIIVDGTKDTFYKQPMFYHLGHFSKFIPEGSTRVGLVASQKNDLDAVALLHPDGSAVVVVLNRSSKDVPLTIKDPAVGFLETISPGYSIHTYLWRRQ

SEQ ID NO: 1501 - DNA, 1608 bp, synthetic construct
  misc_feature 1..1608: note = Variant of B-Glucocerebrosidase
  source 1..1608: mol_type = other DNA
atggagttttcttctcctagtagagaagaatgccccaagccactgagcagggtgagcatcatggctggatccctcacagggctgcttcttttgcaggcagtctcatgggcctctggagccaggccctgtattcccaagtcattcggctactcctcagtggtgtgtgtatgcaatgccacctattgtgacagtgtcgatcctctcactctccctgctctgggtaccttctcccggtatgagagcacaagaagtggaagacgcatggagctctcaatgggccctatacaggctaaccgcactgggacaggtctgctgctgaccctccaacctgaacagaagtttcagaaagtcaagggatttggaggagccatgactgatgcagcagcactcaacatcttggccctgtctccaccagcccagaacctgctgttgaagtcctacttctcagaggaggggattgagtacaacatcatccgggttcccatggctagctgtgacttctccattaggacctatacatacgctgacacccccgatgattttcagctccataatttcagtctccctgaagaagacaccaaatggaagatacctctgattcacagagccttgcaactgtcccaaaggccagtgagcctcttcgcttctccctggactagtcctacatggctgaagactaatggtgcttacaatgggaagggctccctgaaaggacagccaggtgacatatatcatcagacatgggcccgctactttgtgaaattccttgatgcctatgcagagcacgggctccaattctgggcagtcaccgcagaaaacgagccctcagctgggctgctgtctggctacccctttcagtgcttgggctttactcctgagcatcaacgggacttcattgcccgggatttggggccaacactggccaacagcacccaccacaatgtaagactcctcattctggatgaccagaggctgctgctccctcattgggccaaggtggtgttgacaaacccagaagctgccaaatatgttcatggcatcgctgtccactggtacctggattttttggcccctgccaagtggactctgggagagacccacagactcttccccaataccacactgtttgcatcagaagcctgcgtggggagcaaattctgggagcagtctgttaggctgggttcctgggatcggggcatgcaatattcccatagtataatagagaacctcctctaccacgtggtaggatggacagactggaatctggctttgaacccagaaggaggccccaattgggtgcgcaactttgttgacagccccatcattgtggatatcacaaaggacaccttctacaaacagcctatgttctatcatctggggcactttagcaagttcattccagagggttccactagagtaggcttggttgcctcacagaagaatgatctggatgctgtggcactcaaccatcctgacgggagtgcagtggtggtagtactgaacaggtctagcaaagatgttcccttgactatcaaagacccagctgtgggctttctggaaaccatttcccctggatactctatccacacctatctctggagaagacag

SEQ ID NO: 1502 - protein, 536 aa, synthetic construct
  REGION 1..536: note = Variant of B-Glucocerebrosidase
MEFSSPSREECPKPLSRVSIMAGSLTGLLLLQAVSWASGARPCIPKSFGYSSVVCVCNATYCDSVDPLTLPALGTFSRYESTRSGRRMELSMGPIQANRTGTGLLLTLQPEQKFQKVKGFGGAMTDAAALNILALSPPAQNLLLKSYFSEEGIEYNIIRVPMASCDFSIRTYTYADTPDDFQLHNFSLPEEDTKWKIPLIHRALQLSQRPVSLFASPWTSPTWLKTNGAYNGKGSLKGQPGDIYHQTWARYFVKFLDAYAEHGLQFWAVTAENEPSAGLLSGYPFQCLGFTPEHQRDFIARDLGPTLANSTHHNVRLLILDDQRLLLPHWAKVVLTNPEAAKYVHGIAVHWYLDFLAPAKWTLGETHRLFPNTTLFASEACVGSKFWEQSVRLGSWDRGMQYSHSIIENLLYHVVGWTDWNLALNPEGGPNWVRNFVDSPIIVDITKDTFYKQPMFYHLGHFSKFIPEGSTRVGLVASQKNDLDAVALNHPDGSAVVVVLNRSSKDVPLTIKDPAVGFLETISPGYSIHTYLWRRQ

SEQ ID NO: 1503 - DNA, 1608 bp, synthetic construct
  misc_feature 1..1608: note = Variant of B-Glucocerebrosidase
  source 1..1608: mol_type = other DNA
atggagttttcttctcctagtagagaagaatgccccaagccactgagcagggtgagcatcatggctggatccctcacagggctgcttcttttgcaggcagtctcatgggcctctggagccaggccctgtattcccaagtcattcggctactcctcagtggtgtgtgtatgcaatgccacctattgtgacagtgtcgatcctctcactctccctgctctgggtaccttctcccggtatgagagcacaagaagtggaagacgcatggaggcatcaatgggccctatacaggctaaccgcactgggacaggtctgctgctgaccctccaacctgaacagaagtttcagaaagtcaagggatttggaggagccatgactgatgcagcagcactcaacatcttggccctgtctccaccagcccagaacctgctgttgaagtcctacttctcagaggaggggattgagtacaacatcatccgggttcccatggctagctgtgacttctccattaggacctatacatacgctgacacccccgatgattttcagctccataatttcagtctccctgaagaagacaccaaatggaagatacctctgattcacagagccttgcaactgtcccaaaggccagtgagcctcttcgcttctccctggactagtcctacatggctgaagactaatggtgcttacaatgggaagggctccctgaaaggacagccaggtgacatatatcatcagacatgggcccgctactttgtgaaattccttgatgcctatgcagagcacgggctccaattctgggcagtcaccgcagaaaacgagccctcagctgggctgctgtctggctacccctttcagtgcttgggctttactcctgagcatcaacgggacttcattgcccgggatttggggccaacactggccaacagcacccaccacaatgtaagactcctcattctggatgaccagaggctgctgctccctcattgggccaaggtggtgttgacaaacccagaagctgccaaatatgttcatggcatcgctgtccactggtacctggattttttggcccctgccaagtggactctgggagagacccacagactcttccccaataccacactgtttgcatcagaagcctgcgtggggagcaaattctgggagcagtctgttaggctgggttcctgggatcggggcatgcaatattcccatagtataatagagaacctcctctaccacgtggtaggatggacagactggaatctggctttgaacccagaaggaggccccaattgggtgcgcaactttgttgacagccccatcattgtggatatcacaaaggacaccttctacaaacagcctatgttctatcatctggggcactttagcaagttcattccagagggttccactagagtaggcttggttgcctcacagaagaatgatctggatgctgtggcactcctgcatcctgacgggagtgcagtggtggtagtactgaacaggtctagcaaagatgttcccttgactatcaaagacccagctgtgggctttctggaaaccatttcccctggatactctatccacacctatctctggagaagacag

SEQ ID NO: 1504 - protein, 536 aa, synthetic construct
  REGION 1..536: note = Variant of B-Glucocerebrosidase
MEFSSPSREECPKPLSRVSIMAGSLTGLLLLQAVSWASGARPCIPKSFGYSSVVCVCNATYCDSVDPLTLPALGTFSRYESTRSGRRMEASMGPIQANRTGTGLLLTLQPEQKFQKVKGFGGAMTDAAALNILALSPPAQNLLLKSYFSEEGIEYNIIRVPMASCDFSIRTYTYADTPDDFQLHNFSLPEEDTKWKIPLIHRALQLSQRPVSLFASPWTSPTWLKTNGAYNGKGSLKGQPGDIYHQTWARYFVKFLDAYAEHGLQFWAVTAENEPSAGLLSGYPFQCLGFTPEHQRDFIARDLGPTLANSTHHNVRLLILDDQRLLLPHWAKVVLTNPEAAKYVHGIAVHWYLDFLAPAKWTLGETHRLFPNTTLFASEACVGSKFWEQSVRLGSWDRGMQYSHSIIENLLYHVVGWTDWNLALNPEGGPNWVRNFVDSPIIVDITKDTFYKQPMFYHLGHFSKFIPEGSTRVGLVASQKNDLDAVALLHPDGSAVVVVLNRSSKDVPLTIKDPAVGFLETISPGYSIHTYLWRRQ

SEQ ID NO: 1505 - DNA, 1608 bp, synthetic construct
  misc_feature 1..1608: note = Variant of B-Glucocerebrosidase
  source 1..1608: mol_type = other DNA
atggagttttcttctcctagtagagaagaatgccccaagccactgagcagggtgagcatcatggctggatccctcacagggctgcttcttttgcaggcagtctcatgggcctctggagccaggccctgtattcccaagtcattcggctactcctcagtggtgtgtgtatgcaatgccacctattgtgacagtgtcgatcctctcactctccctgctctgggtaccttctcccggtatgagagcacaagaagtggaagacgcatggagctctcaatgggccctatacaggctaaccgcactgggacaggtctgctgctgaccctccaacctgaacagaagtttcagaaagtcaagggatttggaggagccatgactgatgcagcagcactcaacatcttggccctgtctccaccagcccagaacctgctgttgaagtcctacttctcagaggaggggattgagtacaacatcatccgggttcccatggctagctgtgacttctccattaggacctatacatacgctgacacccccgatgattttcagctccataatttcagtctccctgaagaagacaccaaatggaagatacctctgattcacagagccttgcaactgtcccaaaggccagtgagcctcttcgcttctccctggactagtcctacatggctgaagactaatggtgcttacaatgggaagggctccctgaaaggacagccaggtgacatatatcatcagacatgggcccgctactttgtgaaattccttgatgcctatgcagagcacgggctccaattctgggcagtcaccgcagaaaacgagccctcagctgggctgctgtctggctacccctttcagtgcttgggctttactcctgagcatcaacgggacttcattgcccgggatttggggccaacactggccaacagcacccaccacaatgtaagactcctcattctggatgaccagaggctgctgctccctcattgggccaaggtggtgttgacaaacccagaagctgccaaatatgttcatggcatcgctgtccactggtacctggattttttggcccctgccaagtggactctgggagagacccacagactcttccccaataccacactgtttgcatcagaagcctgcgtggggagcaaactctgggagcagtctgttaggctgggttcctgggatcggggcatgcaatattcccatagtataatagagaacctcctctaccacgtggtaggatggacagactggaatctggctttgaacccagaaggaggccccaattgggtgcgcaactttgttgacagccccatcattgtggatatcacaaaggacaccttctacaaacagcctatgttctatcatctggggcactttagcaagttcattccagagggttccactagagtaggcttggttgcctcacagaagaatgatctggatgctgtggcactcctgcatcctgacgggagtgcagtggtggtagtactgaacaggtctagcaaagatgttcccttgactatcaaagacccagctgtgggctttctggaaaccatttcccctggatactctatccacacctatctctggagaagacag

SEQ ID NO: 1506 - protein, 536 aa, synthetic construct
  REGION 1..536: note = Variant of B-Glucocerebrosidase
MEFSSPSREECPKPLSRVSIMAGSLTGLLLLQAVSWASGARPCIPKSFGYSSVVCVCNATYCDSVDPLTLPALGTFSRYESTRSGRRMELSMGPIQANRTGTGLLLTLQPEQKFQKVKGFGGAMTDAAALNILALSPPAQNLLLKSYFSEEGIEYNIIRVPMASCDFSIRTYTYADTPDDFQLHNFSLPEEDTKWKIPLIHRALQLSQRPVSLFASPWTSPTWLKTNGAYNGKGSLKGQPGDIYHQTWARYFVKFLDAYAEHGLQFWAVTAENEPSAGLLSGYPFQCLGFTPEHQRDFIARDLGPTLANSTHHNVRLLILDDQRLLLPHWAKVVLTNPEAAKYVHGIAVHWYLDFLAPAKWTLGETHRLFPNTTLFASEACVGSKLWEQSVRLGSWDRGMQYSHSIIENLLYHVVGWTDWNLALNPEGGPNWVRNFVDSPIIVDITKDTFYKQPMFYHLGHFSKFIPEGSTRVGLVASQKNDLDAVALLHPDGSAVVVVLNRSSKDVPLTIKDPAVGFLETISPGYSIHTYLWRRQ

SEQ ID NO: 1507 - DNA, 1608 bp, synthetic construct
  misc_feature 1..1608: note = Variant of B-Glucocerebrosidase
  source 1..1608: mol_type = other DNA
atggagttttcttctcctagtagagaagaatgccccaagccactgagcagggtgagcatcatggctggatccctcacagggctgcttcttttgcaggcagtctcatgggcctctggagccaggccctgtattcccaagtcattcggctactcctcagtggtgtgtgtatgcaatgccacctattgtgacagtgtcgatcctctcactctccctgctctgggtgagttctcccggtatgagagcacaagaagtggaagacgcatggagctctcaatgggccctatacaggctaaccgcactgggacaggtctgctgctgaccctccaacctgaacagaagtttcagaaagtcaagggatttggaggagccatgactgatgcagcagcactcaacatcttggccctgtctccaccagcccagaacctgctgttgaagtcctacttctcagaggaggggattgagtacaacatcatccgggttcccatggctagctgtgacttctccattaggacctatacatacgctgacacccccgatgattttcagctccataatttcagtctccctgaagaagacaccaaatggaagatacctctgattcacagagccttgcaactgtcccaaaggccagtgagcctcttcgcttctccctggactagtcctacatggctgaagactaatggtgcttacaatgggaagggctccctgaaaggacagccaggtgacatatatcatcagacatgggcccgctactttgtgaaattccttgatgcctatgcagagcacgggctccaattctgggcagtcaccgcagaaaacgagccctcagctgggctgctgtctggctacccctttcagtgcttgggctttactcctgagcatcaacgggacttcattgcccgggatttggggccaacactggccaacagcacccaccacaatgtaagactcctcattctggatgaccagaggctgctgctccctcattgggccaaggtggtgttgacaaacccagaagctgccaaatatgttcatggcatcgctgtccactggtacctggattttttggcccctgccaagtggactctgggagagacccacagactcttccccaataccacactgtttgcatcagaagcctgcgtggggagcaaattctgggagcagtctgttaggctgggttcctgggatcggggcatgcaatattcccatagtataatagagaacctcctctaccacgtggtaggatggacagactggaatctggctttgaacccagaaggaggccccaattgggtgcgcaactttgttgacagccccatcattgtggatatcacaaaggacaccttctacaaacagcctatgttctatcatctggggcactttagcaagttcattccagagggttccactagagtaggcttggttgcctcacagaagaatgatctggatgctgtggcactcctgcatcctgacgggagtgcagtggtggtagtactgaacaggtctagcaaagatgttcccttgactatcaaagacccagctgtgggctttctggaaaccatttcccctggatactctatccacacctatctctggagaagacag

SEQ ID NO: 1508 - protein, 536 aa, synthetic construct
  REGION 1..536: note = Variant of B-Glucocerebrosidase
MEFSSPSREECPKPLSRVSIMAGSLTGLLLLQAVSWASGARPCIPKSFGYSSVVCVCNATYCDSVDPLTLPALGEFSRYESTRSGRRMELSMGPIQANRTGTGLLLTLQPEQKFQKVKGFGGAMTDAAALNILALSPPAQNLLLKSYFSEEGIEYNIIRVPMASCDFSIRTYTYADTPDDFQLHNFSLPEEDTKWKIPLIHRALQLSQRPVSLFASPWTSPTWLKTNGAYNGKGSLKGQPGDIYHQTWARYFVKFLDAYAEHGLQFWAVTAENEPSAGLLSGYPFQCLGFTPEHQRDFIARDLGPTLANSTHHNVRLLILDDQRLLLPHWAKVVLTNPEAAKYVHGIAVHWYLDFLAPAKWTLGETHRLFPNTTLFASEACVGSKFWEQSVRLGSWDRGMQYSHSIIENLLYHVVGWTDWNLALNPEGGPNWVRNFVDSPIIVDITKDTFYKQPMFYHLGHFSKFIPEGSTRVGLVASQKNDLDAVALLHPDGSAVVVVLNRSSKDVPLTIKDPAVGFLETISPGYSIHTYLWRRQ

SEQ ID NO: 1509 - DNA, 1608 bp, synthetic construct
  misc_feature 1..1608: note = Variant of B-Glucocerebrosidase
  source 1..1608: mol_type = other DNA
atggagttttcttctcctagtagagaagaatgccccaagccactgagcagggtgagcatcatggctggatccctcacagggctgcttcttttgcaggcagtctcatgggcctctggagccaggccctgtattcccaagtcattcggctactcctcagtggtgtgtgtatgcaatgccacctattgtgacagtgtcgatcctctcactctccctgctctgggtaccttctcccggtatgagagcacaagaagtggagaacgcatggagctctcaatgggccctatacaggctaaccgcactgggacaggtctgctgctgaccctccaacctgaacagaagtttcagaaagtcaagggatttggaggagccatgactgatgcagcagcactcaacatcttggccctgtctccaccagcccagaacctgctgttgaagtcctacttctcagaggaggggattgagtacaacatcatccgggttcccatggctagctgtgacttctccattaggacctatacatacgctgacacccccgatgattttcagctccataatttcagtctccctgaagaagacaccaaatggaagatacctctgattcacagagccttgcaactgtcccaaaggccagtgagcctcttcgcttctccctggactagtcctacatggctgaagactaatggtgcttacaatgggaagggctccctgaaaggacagccaggtgacatatatcatcagacatgggcccgctactttgtgaaattccttgatgcctatgcagagcacgggctccaattctgggcagtcaccgcagaaaacgagccctcagctgggctgctgtctggctacccctttcagtgcttgggctttactcctgagcatcaacgggacttcattgcccgggatttggggccaacactggccaacagcacccaccacaatgtaagactcctcattctggatgaccagaggctgctgctccctcattgggccaaggtggtgttgacaaacccagaagctgccaaatatgttcatggcatcgctgtccactggtacctggattttttggcccctgccaagtggactctgggagagacccacagactcttccccaataccacactgtttgcatcagaagcctgcgtggggagcaaattctgggagcagtctgttaggctgggttcctgggatcggggcatgcaatattcccatagtataatagagaacctcctctaccacgtggtaggatggacagactggaatctggctttgaacccagaaggaggccccaattgggtgcgcaactttgttgacagccccatcattgtggatatcacaaaggacaccttctacaaacagcctatgttctatcatctggggcactttagcaagttcattccagagggttccactagagtaggcttggttgcctcacagaagaatgatctggatgctgtggcactcctgcatcctgacgggagtgcagtggtggtagtactgaacaggtctagcaaagatgttcccttgactatcaaagacccagctgtgggctttctggaaaccatttcccctggatactctatccacacctatctctggagaagacag

SEQ ID NO: 1510 - protein, 536 aa, synthetic construct
  REGION 1..536: note = Variant of B-Glucocerebrosidase
MEFSSPSREECPKPLSRVSIMAGSLTGLLLLQAVSWASGARPCIPKSFGYSSVVCVCNATYCDSVDPLTLPALGTFSRYESTRSGERMELSMGPIQANRTGTGLLLTLQPEQKFQKVKGFGGAMTDAAALNILALSPPAQNLLLKSYFSEEGIEYNIIRVPMASCDFSIRTYTYADTPDDFQLHNFSLPEEDTKWKIPLIHRALQLSQRPVSLFASPWTSPTWLKTNGAYNGKGSLKGQPGDIYHQTWARYFVKFLDAYAEHGLQFWAVTAENEPSAGLLSGYPFQCLGFTPEHQRDFIARDLGPTLANSTHHNVRLLILDDQRLLLPHWAKVVLTNPEAAKYVHGIAVHWYLDFLAPAKWTLGETHRLFPNTTLFASEACVGSKFWEQSVRLGSWDRGMQYSHSIIENLLYHVVGWTDWNLALNPEGGPNWVRNFVDSPIIVDITKDTFYKQPMFYHLGHFSKFIPEGSTRVGLVASQKNDLDAVALLHPDGSAVVVVLNRSSKDVPLTIKDPAVGFLETISPGYSIHTYLWRRQ

SEQ ID NO: 1511 - DNA, 1608 bp, synthetic construct
  misc_feature 1..1608: note = Variant of B-Glucocerebrosidase
  source 1..1608: mol_type = other DNA
atggagttttcttctcctagtagagaagaatgccccaagccactgagcagggtgagcatcatggctggatccctcacagggctgcttcttttgcaggcagtctcatgggcctctggagccaggccctgtattcccaagtcattcggctactcctcagtggtgtgtgtatgcaatgccacctattgtgacagtgtcgatcctctcactctccctgctctgggtaccttctcccggtatgagagcacaagaagtggaagacgcatggagctctcaatgggccctatacaggctaaccgcactgggacaggtctgctgctgaccctccaacctgaacagaagtttcagaaagtcaagggatttggaggagccatgactgatgcagcagcactcaacatcttggccctgtctccaccagcccagaacctgctgttgaagtcctacttctcagaggaggggattgagtacaacatcatccgggttcccatggctagctgtgacttctccattaggacctatacatacgctgacacccccgatgattttcagctccataatttcagtctccctgaagaagacaccaaatggaagatacctctgattcacagagccttgcaactgtcccaaaggccagtgagcctcttcgcttctccctggactagtcctacatggctgaagactaatggtgcttacaatgggaagggctccctgaaaggacagccaggtgacatatatcatcagacatgggcccgctactttgtgaaattccttgatgcctatgcagagcacgggctccaattctgggcagtcaccgcagaaaacgagccctcagctgggctgctgtctggctacccctttcagtgcttgggctttactcctgagcatcaacgggacttcattgcccgggatttggggccaacactggccaacagcacccaccacaatgtaagactcctcattctggatgaccagaggctgctgctccctcattgggccaaggtggtgttgacaaacccagaagctgccaaatatgttcatggcatcgctgtccactggtacctggattttttggcccctgccaagtggactctgggagagacccacagactcttccccaataccacactgtttgcatcagaagcctgcgtggggagcaaattctgggagcagtctgttaggctgggttcctgggatcggggcatgcaatattcccatagtataatagagaacctcctctaccacgtggtaggatggacagactggaatctggctttgaacccagaaggaggccccaattgggtgcgcaactttgttgacagccccatcattgtggatatcacaaaggacaccttctacaaacagcctatgttctatcatctggggcactttagcaagttcattccagagggttccactagagtaggcttggttgcctcacagaagaatgatctggatgctgtggcactccagcatcctgacgggagtgcagtggtggtagtactgaacaggtctagcaaagatgttcccttgactatcaaagacccagctgtgggctttctggaaaccatttcccctggatactctatccacacctatctctggagaagacag

SEQ ID NO: 1512 - protein, 536 aa, synthetic construct
  REGION 1..536: note = Variant of B-Glucocerebrosidase
MEFSSPSREECPKPLSRVSIMAGSLTGLLLLQAVSWASGARPCIPKSFGYSSVVCVCNATYCDSVDPLTLPALGTFSRYESTRSGRRMELSMGPIQANRTGTGLLLTLQPEQKFQKVKGFGGAMTDAAALNILALSPPAQNLLLKSYFSEEGIEYNIIRVPMASCDFSIRTYTYADTPDDFQLHNFSLPEEDTKWKIPLIHRALQLSQRPVSLFASPWTSPTWLKTNGAYNGKGSLKGQPGDIYHQTWARYFVKFLDAYAEHGLQFWAVTAENEPSAGLLSGYPFQCLGFTPEHQRDFIARDLGPTLANSTHHNVRLLILDDQRLLLPHWAKVVLTNPEAAKYVHGIAVHWYLDFLAPAKWTLGETHRLFPNTTLFASEACVGSKFWEQSVRLGSWDRGMQYSHSIIENLLYHVVGWTDWNLALNPEGGPNWVRNFVDSPIIVDITKDTFYKQPMFYHLGHFSKFIPEGSTRVGLVASQKNDLDAVALQHPDGSAVVVVLNRSSKDVPLTIKDPAVGFLETISPGYSIHTYLWRRQ

SEQ ID NO: 1513 - DNA, 1608 bp, synthetic construct
  misc_feature 1..1608: note = Variant of B-Glucocerebrosidase
  source 1..1608: mol_type = other DNA
atggagttttcttctcctagtagagaagaatgccccaagccactgagcagggtgagcatcatggctggatccctcacagggctgcttcttttgcaggcagtctcatgggcctctggagccaggccctgtattcccaagtcattcggctactcctcagtggtgtgtgtatgcaatgccacctattgtgacagtgtcgatcctctcactctccctgctctgggtaccttctcccggtatgagagcacaagaagtggaagacgcatggagctctcaatgggccctatacaggctaaccgcactgggacaggtctgctgctgaccctccaacctgaacagaagtttcagaaagtcaagggatttggaggagccatgactgatgcagcagcactcaacatcttggccctgtctccaccagcccagaacctgctgttgaagtcctacttctcagaggaggggattgagtacaacatcatccgggttcccatggctagctgtgacttctccattaggacctatacatacgctgacacccccgatgattttgagctccataatttcagtctccctgaagaagacaccaaatggaagatacctctgattcacagagccttgcaactgtcccaaaggccagtgagcctcttcgcttctccctggactagtcctacatggctgaagactaatggtgcttacaatgggaagggctccctgaaaggacagccaggtgacatatatcatcagacatgggcccgctactttgtgaaattccttgatgcctatgcagagcacgggctccaattctgggcagtcaccgcagaaaacgagccctcagctgggctgctgtctggctacccctttcagtgcttgggctttactcctgagcatcaacgggacttcattgcccgggatttggggccaacactggccaacagcacccaccacaatgtaagactcctcattctggatgaccagaggctgctgctccctcattgggccaaggtggtgttgacaaacccagaagctgccaaatatgttcatggcatcgctgtccactggtacctggattttttggcccctgccaagtggactctgggagagacccacagactcttccccaataccacactgtttgcatcagaagcctgcgtggggagcaaattctgggagcagtctgttaggctgggttcctgggatcggggcatgcaatattcccatagtataatagagaacctcctctaccacgtggtaggatggacagactggaatctggctttgaacccagaaggaggccccaattgggtgcgcaactttgttgacagccccatcattgtggatatcacaaaggacaccttctacaaacagcctatgttctatcatctggggcactttagcaagttcattccagagggttccactagagtaggcttggttgcctcacagaagaatgatctggatgctgtggcactcctgcatcctgacgggagtgcagtggtggtagtactgaacaggtctagcaaagatgttcccttgactatcaaagacccagctgtgggctttctggaaaccatttcccctggatactctatccacacctatctctggagaagacag

SEQ ID NO: 1514 - protein, 536 aa, synthetic construct
  REGION 1..536: note = Variant of B-Glucocerebrosidase
MEFSSPSREECPKPLSRVSIMAGSLTGLLLLQAVSWASGARPCIPKSFGYSSVVCVCNATYCDSVDPLTLPALGTFSRYESTRSGRRMELSMGPIQANRTGTGLLLTLQPEQKFQKVKGFGGAMTDAAALNILALSPPAQNLLLKSYFSEEGIEYNIIRVPMASCDFSIRTYTYADTPDDFELHNFSLPEEDTKWKIPLIHRALQLSQRPVSLFASPWTSPTWLKTNGAYNGKGSLKGQPGDIYHQTWARYFVKFLDAYAEHGLQFWAVTAENEPSAGLLSGYPFQCLGFTPEHQRDFIARDLGPTLANSTHHNVRLLILDDQRLLLPHWAKVVLTNPEAAKYVHGIAVHWYLDFLAPAKWTLGETHRLFPNTTLFASEACVGSKFWEQSVRLGSWDRGMQYSHSIIENLLYHVVGWTDWNLALNPEGGPNWVRNFVDSPIIVDITKDTFYKQPMFYHLGHFSKFIPEGSTRVGLVASQKNDLDAVALLHPDGSAVVVVLNRSSKDVPLTIKDPAVGFLETISPGYSIHTYLWRRQ

SEQ ID NO: 1515 - DNA, 1608 bp, synthetic construct
  misc_feature 1..1608: note = Variant of B-Glucocerebrosidase
  source 1..1608: mol_type = other DNA
atggagttttcttctcctagtagagaagaatgccccaagccactgagcagggtgagcatcatggctggatccctcacagggctgcttcttttgcaggcagtctcatgggcctctggagccaggccctgtattcccaagtcattcggctactcctcagtggtgtgtgtatgcaatgccacctattgtgacagtgtcgatcctctcactctccctgctctgggtaccttctcccggtatgagagcacaagaagtggaagacgcatggagctctcaatgggccctatacaggctaaccgcactgggacaggtctgctgctgaccctccaacctgaacagaagtttcagaaagtcaagggatttggaggagccatgactgatgcagcagcactcaacatcttggccctgtctccaccagcccagaacctgctgttgaagtcctacttctcagaggaggggattgagtacaacatcatccgggttcccatggctagctgtgacttctccattaggacctatacatacgctgacacccccgatgattttcagctccataatttcagtctccctgaagaagacaccaaatggaagatacctctgattcacagagccttgcaactgtcccaaaggccagtgagcctcttcgcttctccctggactagtcctacatggctgaagactaatggtgcttacaatgggaagggctccctgaaaggacagccaggtgacatatatcatcagacatgggcccgctactttgtgaaattccttgatgcctatgcagagcacgggctccaattctgggcagtcaccgcagaaaacgagccctcagctgggctgctgtctggctacccctttcagtgcttgggctttactcctgagcatcaacgggacttcattgcccgggatttggggccaacactggccaacagcacccaccacaatgtaagactcctcattctggatgaccagaggctgctgctccctcattgggccaaggtggtgttgacaaacccagaagctgccaaatatgttcatggcatcgctgtccactggtacctggattttttggcccctgccaagtggactctgggagagacccacagactcttccccaataccacactgtttgcatcagaagcctgcgtggggagcaaattctgggagcagtctgttaggctgggttcctgggatcggggcatgcaatattcccatagtataatagagaacctcctctaccacgtggtaggatggacagactggaatctggctttgaacccagaaggaggccccaattgggtgcgcaactttgttgacagccccatcattgtggatatccacaaggacaccttctacaaacagcctatgttctatcatctggggcactttagcaagttcattccagagggttccactagagtaggcttggttgcctcacagaagaatgatctggatgctgtggcactcctgcatcctgacgggagtgcagtggtggtagtactgaacaggtctagcaaagatgttcccttgactatcaaagacccagctgtgggctttctggaaaccatttcccctggatactctatccacacctatctctggagaagacag

SEQ ID NO: 1516 - protein, 536 aa, synthetic construct
  REGION 1..536: note = Variant of B-Glucocerebrosidase
MEFSSPSREECPKPLSRVSIMAGSLTGLLLLQAVSWASGARPCIPKSFGYSSVVCVCNATYCDSVDPLTLPALGTFSRYESTRSGRRMELSMGPIQANRTGTGLLLTLQPEQKFQKVKGFGGAMTDAAALNILALSPPAQNLLLKSYFSEEGIEYNIIRVPMASCDFSIRTYTYADTPDDFQLHNFSLPEEDTKWKIPLIHRALQLSQRPVSLFASPWTSPTWLKTNGAYNGKGSLKGQPGDIYHQTWARYFVKFLDAYAEHGLQFWAVTAENEPSAGLLSGYPFQCLGFTPEHQRDFIARDLGPTLANSTHHNVRLLILDDQRLLLPHWAKVVLTNPEAAKYVHGIAVHWYLDFLAPAKWTLGETHRLFPNTTLFASEACVGSKFWEQSVRLGSWDRGMQYSHSIIENLLYHVVGWTDWNLALNPEGGPNWVRNFVDSPIIVDIHKDTFYKQPMFYHLGHFSKFIPEGSTRVGLVASQKNDLDAVALLHPDGSAVVVVLNRSSKDVPLTIKDPAVGFLETISPGYSIHTYLWRRQ

SEQ ID NO: 1517 - DNA, 1608 bp, synthetic construct
  misc_feature 1..1608: note = Variant of B-Glucocerebrosidase
  source 1..1608: mol_type = other DNA
atggagttttcttctcctagtagagaagaatgccccaagccactgagcagggtgagcatcatggctggatccctcacagggctgcttcttttgcaggcagtctcatgggcctctggagccaggccctgtattcccaagtcattcggctactcctcagtggtgtgtgtatgcaatgccacctattgtgacagtgtcgatcctctcactctccctgctctgggtaccttctcccggtatgagagcacaagaagtggaagacgcatggagctctcaatgggccctatacaggctaaccgcactgggacaggtctgctgctgaccctccaacctgaacagaagtttcagaaagtcaagggatttggaggagccatgactgatgcagcagcactcaacatcttggccctgtctccaccagcccagaacctgctgttgaagtcctacttctcagaggaggggattgagtacaacatcatccgggttcccatggctagctgtgacttctccattaggacctatacatacgctgacacccccgatgattttcagctccataatttcagtctccctgaagaagacaccaaatggaagatacctctgattcacagagccttgcaactgtcccaaaggccagtgagcctcttcgcttctccctggactagtcctacatggctgaagactaatggtgcttacaatgggaagggctccctgaaaggacagccaggtgacatatatcatcagacatgggcccgctactttgtgaaattccttgatgcctatgcagagcacgggctccaattctgggcagtcaccgcagaaaacgagccctcagctgggctgctgtctggctacccctttcagtgcttgggctttactcctgagcatcaacgggacttcattgcccgggatttggggccaacactggccaacagcacccaccacaatgtaagactcctcattctggatgaccagaggctgctgctccctcattgggccaaggtggtgttgacaaacccagaagctgccaaatatgttcatggcatcgctgtccactggtacctggattttttggcccctgccaagtggactctgggagagacccacagactcttccccaataccacactgtttgcatcagaagcctgcgtggggagcaaattctgggagcagtctgttaggctgggttcctgggatcggggcatgcaatattcccatagtataatagagaacctcctctaccacgtggtaggatggacagactggaatctggctttgaacccagaaggaggccccaattgggtgcgcaactttgttgacagccccatcattgtggatatcacaaaggacaccttctacaaacagcctatgttctatcatctggggcactttagcaagttcattccagagggttccactagagtaggcttggttgcctcacagaagaatgatctggatgctgtggcactcctgaatcctgacgggagtgcagtggtggtagtactgaacaggtctagcaaagatgttcccttgactatcaaagacccagctgtgggctttctggaaaccatttcccctggatactctatccacacctatctctggagaagacag

SEQ ID NO: 1518 - protein, 536 aa, synthetic construct
  REGION 1..536: note = Variant of B-Glucocerebrosidase
MEFSSPSREECPKPLSRVSIMAGSLTGLLLLQAVSWASGARPCIPKSFGYSSVVCVCNATYCDSVDPLTLPALGTFSRYESTRSGRRMELSMGPIQANRTGTGLLLTLQPEQKFQKVKGFGGAMTDAAALNILALSPPAQNLLLKSYFSEEGIEYNIIRVPMASCDFSIRTYTYADTPDDFQLHNFSLPEEDTKWKIPLIHRALQLSQRPVSLFASPWTSPTWLKTNGAYNGKGSLKGQPGDIYHQTWARYFVKFLDAYAEHGLQFWAVTAENEPSAGLLSGYPFQCLGFTPEHQRDFIARDLGPTLANSTHHNVRLLILDDQRLLLPHWAKVVLTNPEAAKYVHGIAVHWYLDFLAPAKWTLGETHRLFPNTTLFASEACVGSKFWEQSVRLGSWDRGMQYSHSIIENLLYHVVGWTDWNLALNPEGGPNWVRNFVDSPIIVDITKDTFYKQPMFYHLGHFSKFIPEGSTRVGLVASQKNDLDAVALLNPDGSAVVVVLNRSSKDVPLTIKDPAVGFLETISPGYSIHTYLWRRQ

SEQ ID NO: 1519 - DNA, 1608 bp, synthetic construct
  misc_feature 1..1608: note = Variant of B-Glucocerebrosidase
  source 1..1608: mol_type = other DNA
atggagttttcttctcctagtagagaagaatgccccaagccactgagcagggtgagcatcatggctggatccctcacagggctgcttcttttgcaggcagtctcatgggcctctggagccaggccctgtattcccaagtcattcggctactcctcagtggtgtgtgtatgcaatgccacctattgtgacagtgtcgatcctctcactctccctgctctgggtaccttctcccggtatgagagcacaagaagtggaagacgcatggagctctcaatgggccctatacaggctaaccgcactgggacaggtctgctgctgaccctccaacctgaacagaagtttcagaaagtcaagggatttggaggagccatgactgatgcagcagcactcaacatcttggccctgtctccaccagcccagaacctgctgttgaagtcctacttctcagaggaggggattgagtacaacatcatccgggttcccatggctagctgtgacttctccattaggacctatacatacgctgacacccccgatgattttcagctccataatttcagtctccctgaagaagacaccaaatggaagatacctctgattcacagagccttgcaactgtcccaaaggccagtgagcctcttcgcttctccctggactagtcctacatggctgaagactaatggtgcttacaatgggaagggctccctgaaaggacagccaggtgacatatatcatcagacatgggcccgctactttgtgaaattccttgatgcctatgcagagcacgggctccaattctgggcagtcaccgcagaaaacgagccctcagctgggctgctgtctggctacccctttcagtgcttgggctttactcctgagcatcaacgggacttcgtggcccgggatttggggccaacactggccaacagcacccaccacaatgtaagactcctcattctggatgaccagaggctgctgctccctcattgggccaaggtggtgttgacaaacccagaagctgccaaatatgttcatggcatcgctgtccactggtacctggattttttggcccctgccaagtggactctgggagagacccacagactcttccccaataccacactgtttgcatcagaagcctgcgtggggagcaaattctgggagcagtctgttaggctgggttcctgggatcggggcatgcaatattcccatagtataatagagaacctcctctaccacgtggtaggatggacagactggaatctggctttgaacccagaaggaggccccaattgggtgcgcaactttgttgacagccccatcattgtggatatcacaaaggacaccttctacaaacagcctatgttctatcatctggggcactttagcaagttcattccagagggttccactagagtaggcttggttgcctcacagaagaatgatctggatgctgtggcactcctgcatcctgacgggagtgcagtggtggtagtactgaacaggtctagcaaagatgttcccttgactatcaaagacccagctgtgggctttctggaaaccatttcccctggatactctatccacacctatctctggagaagacag

SEQ ID NO: 1520 - protein, 536 aa, synthetic construct
  REGION 1..536: note = Variant of B-Glucocerebrosidase
MEFSSPSREECPKPLSRVSIMAGSLTGLLLLQAVSWASGARPCIPKSFGYSSVVCVCNATYCDSVDPLTLPALGTFSRYESTRSGRRMELSMGPIQANRTGTGLLLTLQPEQKFQKVKGFGGAMTDAAALNILALSPPAQNLLLKSYFSEEGIEYNIIRVPMASCDFSIRTYTYADTPDDFQLHNFSLPEEDTKWKIPLIHRALQLSQRPVSLFASPWTSPTWLKTNGAYNGKGSLKGQPGDIYHQTWARYFVKFLDAYAEHGLQFWAVTAENEPSAGLLSGYPFQCLGFTPEHQRDFVARDLGPTLANSTHHNVRLLILDDQRLLLPHWAKVVLTNPEAAKYVHGIAVHWYLDFLAPAKWTLGETHRLFPNTTLFASEACVGSKFWEQSVRLGSWDRGMQYSHSIIENLLYHVVGWTDWNLALNPEGGPNWVRNFVDSPIIVDITKDTFYKQPMFYHLGHFSKFIPEGSTRVGLVASQKNDLDAVALLHPDGSAVVVVLNRSSKDVPLTIKDPAVGFLETISPGYSIHTYLWRRQ

SEQ ID NO: 1521 - DNA, 1608 bp, synthetic construct
  misc_feature 1..1608: note = Variant of B-Glucocerebrosidase
  source 1..1608: mol_type = other DNA
atggagttttcttctcctagtagagaagaatgccccaagccactgagcagggtgagcatcatggctggatccctcacagggctgcttcttttgcaggcagtctcatgggcctctggagccaggccctgtattcccaagtcattcggctactcctcagtggtgtgtgtatgcaatgccacctattgtgacagtgtcgatcctctcactctccctgctctgggtaccttctcccggtatgagagcacaagaagtggaagacgcatggagctctcaatgggccctataaacgctaaccgcactgggacaggtctgctgctgaccctccaacctgaacagaagtttcagaaagtcaagggatttggaggagccatgactgatgcagcagcactcaacatcttggccctgtctccaccagcccagaacctgctgttgaagtcctacttctcagaggaggggattgagtacaacatcatccgggttcccatggctagctgtgacttctccattaggacctatacatacgctgacacccccgatgattttcagctccataatttcagtctccctgaagaagacaccaaatggaagatacctctgattcacagagccttgcaactgtcccaaaggccagtgagcctcttcgcttctccctggactagtcctacatggctgaagactaatggtgcttacaatgggaagggctccctgaaaggacagccaggtgacatatatcatcagacatgggcccgctactttgtgaaattccttgatgcctatgcagagcacgggctccaattctgggcagtcaccgcagaaaacgagccctcagctgggctgctgtctggctacccctttcagtgcttgggctttactcctgagcatcaacgggacttcattgcccgggatttggggccaacactggccaacagcacccaccacaatgtaagactcctcattctggatgaccagaggctgctgctccctcattgggccaaggtggtgttgacaaacccagaagctgccaaatatgttcatggcatcgctgtccactggtacctggattttttggcccctgccaagtggactctgggagagacccacagactcttccccaataccacactgtttgcatcagaagcctgcgtggggagcaaattctgggagcagtctgttaggctgggttcctgggatcggggcatgcaatattcccatagtataatagagaacctcctctaccacgtggtaggatggacagactggaatctggctttgaacccagaaggaggccccaattgggtgcgcaactttgttgacagccccatcattgtggatatcacaaaggacaccttctacaaacagcctatgttctatcatctggggcactttagcaagttcattccagagggttccactagagtaggcttggttgcctcacagaagaatgatctggatgctgtggcactcctgcatcctgacgggagtgcagtggtggtagtactgaacaggtctagcaaagatgttcccttgactatcaaagacccagctgtgggctttctggaaaccatttcccctggatactctatccacacctatctctggagaagacag

SEQ ID NO: 1522 - protein, 536 aa, synthetic construct
  REGION 1..536: note = Variant of B-Glucocerebrosidase
MEFSSPSREECPKPLSRVSIMAGSLTGLLLLQAVSWASGARPCIPKSFGYSSVVCVCNATYCDSVDPLTLPALGTFSRYESTRSGRRMELSMGPINANRTGTGLLLTLQPEQKFQKVKGFGGAMTDAAALNILALSPPAQNLLLKSYFSEEGIEYNIIRVPMASCDFSIRTYTYADTPDDFQLHNFSLPEEDTKWKIPLIHRALQLSQRPVSLFASPWTSPTWLKTNGAYNGKGSLKGQPGDIYHQTWARYFVKFLDAYAEHGLQFWAVTAENEPSAGLLSGYPFQCLGFTPEHQRDFIARDLGPTLANSTHHNVRLLILDDQRLLLPHWAKVVLTNPEAAKYVHGIAVHWYLDFLAPAKWTLGETHRLFPNTTLFASEACVGSKFWEQSVRLGSWDRGMQYSHSIIENLLYHVVGWTDWNLALNPEGGPNWVRNFVDSPIIVDITKDTFYKQPMFYHLGHFSKFIPEGSTRVGLVASQKNDLDAVALLHPDGSAVVVVLNRSSKDVPLTIKDPAVGFLETISPGYSIHTYLWRRQ

SEQ ID NO: 1523 - DNA, 1608 bp, synthetic construct
  misc_feature 1..1608: note = Variant of B-Glucocerebrosidase
  source 1..1608: mol_type = other DNA
atggagttttcttctcctagtagagaagaatgccccaagccactgagcagggtgagcatcatggctggatccctcacagggctgcttcttttgcaggcagtctcatgggcctctggagccaggccctgtattcccaagtcattcggctactcctcagtggtgtgtgtatgcaatgccacctattgtgacagtgtcgatcctctcactctccctgctctgggtaccttctcccggtatgagagcacaagaagtggaagacgcatggagctctcaatgggccctatacaggctaaccgcactgggcctggtctgctgctgaccctccaacctgaacagaagtttcagaaagtcaagggatttggaggagccatgactgatgcagcagcactcaacatcttggccctgtctccaccagcccagaacctgctgttgaagtcctacttctcagaggaggggattgagtacaacatcatccgggttcccatggctagctgtgacttctccattaggacctatacatacgctgacacccccgatgattttcagctccataatttcagtctccctgaagaagacaccaaatggaagatacctctgattcacagagccttgcaactgtcccaaaggccagtgagcctcttcgcttctccctggactagtcctacatggctgaagactaatggtgcttacaatgggaagggctccctgaaaggacagccaggtgacatatatcatcagacatgggcccgctactttgtgaaattccttgatgcctatgcagagcacgggctccaattctgggcagtcaccgcagaaaacgagccctcagctgggctgctgtctggctacccctttcagtgcttgggctttactcctgagcatcaacgggacttcattgcccgggatttggggccaacactggccaacagcacccaccacaatgtaagactcctcattctggatgaccagaggctgctgctccctcattgggccaaggtggtgttgacaaacccagaagctgccaaatatgttcatggcatcgctgtccactggtacctggattttttggcccctgccaagtggactctgggagagacccacagactcttccccaataccacactgtttgcatcagaagcctgcgtggggagcaaattctgggagcagtctgttaggctgggttcctgggatcggggcatgcaatattcccatagtataatagagaacctcctctaccacgtggtaggatggacagactggaatctggctttgaacccagaaggaggccccaattgggtgcgcaactttgttgacagccccatcattgtggatatcacaaaggacaccttctacaaacagcctatgttctatcatctggggcactttagcaagttcattccagagggttccactagagtaggcttggttgcctcacagaagaatgatctggatgctgtggcactcctgcatcctgacgggagtgcagtggtggtagtactgaacaggtctagcaaagatgttcccttgactatcaaagacccagctgtgggctttctggaaaccatttcccctggatactctatccacacctatctctggagaagacag

SEQ ID NO: 1524 - protein, 536 aa, synthetic construct
  REGION 1..536: note = Variant of B-Glucocerebrosidase
MEFSSPSREECPKPLSRVSIMAGSLTGLLLLQAVSWASGARPCIPKSFGYSSVVCVCNATYCDSVDPLTLPALGTFSRYESTRSGRRMELSMGPIQANRTGPGLLLTLQPEQKFQKVKGFGGAMTDAAALNILALSPPAQNLLLKSYFSEEGIEYNIIRVPMASCDFSIRTYTYADTPDDFQLHNFSLPEEDTKWKIPLIHRALQLSQRPVSLFASPWTSPTWLKTNGAYNGKGSLKGQPGDIYHQTWARYFVKFLDAYAEHGLQFWAVTAENEPSAGLLSGYPFQCLGFTPEHQRDFIARDLGPTLANSTHHNVRLLILDDQRLLLPHWAKVVLTNPEAAKYVHGIAVHWYLDFLAPAKWTLGETHRLFPNTTLFASEACVGSKFWEQSVRLGSWDRGMQYSHSIIENLLYHVVGWTDWNLALNPEGGPNWVRNFVDSPIIVDITKDTFYKQPMFYHLGHFSKFIPEGSTRVGLVASQKNDLDAVALLHPDGSAVVVVLNRSSKDVPLTIKDPAVGFLETISPGYSIHTYLWRRQ

SEQ ID NO: 1525 - DNA, 1608 bp, synthetic construct
  misc_feature 1..1608: note = Variant of B-Glucocerebrosidase
  source 1..1608: mol_type = other DNA
atggagttttcttctcctagtagagaagaatgccccaagccactgagcagggtgagcatcatggctggatccctcacagggctgcttcttttgcaggcagtctcatgggcctctggagccaggccctgtattcccaagtcattcggctactcctcagtggtgtgtgtatgcaatgccacctattgtgacagtgtcgatcctctcactctccctgctctgggtaccttctcccggtatgagagcacaagaagtggaagacgcatggagctctcaatgggccctatacaggctaaccgcactgggacaggtctgctgctgaccctccaacctgaacagaagtttcagaaagtcaagggatttggaggagccatgactgatgcagcagcactcaacatcttggccctgtctccaccagcccagaacctgctgttgaagtcctacttctcagaggaggggattgagtacaacatcatccgggttcccatggctagctgtgacttctccattaggacctatacatacgctgacacccccgatgattttcagctccataatttcagtctccctgaagaagacaccaaatggaagatacctctgattcacagagccttgcaactgtcccaaaggccagtgagcctcttcgcttctccctggactagtcctacatggctgaagactaatggtgctttcaatgggaagggctccctgaaaggacagccaggtgacatatatcatcagacatgggcccgctactttgtgaaattccttgatgcctatgcagagcacgggctccaattctgggcagtcaccgcagaaaacgagccctcagctgggctgctgtctggctacccctttcagtgcttgggctttactcctgagcatcaacgggacttcattgcccgggatttggggccaacactggccaacagcacccaccacaatgtaagactcctcattctggatgaccagaggctgctgctccctcattgggccaaggtggtgttgacaaacccagaagctgccaaatatgttcatggcatcgctgtccactggtacctggattttttggcccctgccaagtggactctgggagagacccacagactcttccccaataccacactgtttgcatcagaagcctgcgtggggagcaaattctgggagcagtctgttaggctgggttcctgggatcggggcatgcaatattcccatagtataatagagaacctcctctaccacgtggtaggatggacagactggaatctggctttgaacccagaaggaggccccaattgggtgcgcaactttgttgacagccccatcattgtggatatcacaaaggacaccttctacaaacagcctatgttctatcatctggggcactttagcaagttcattccagagggttccactagagtaggcttggttgcctcacagaagaatgatctggatgctgtggcactcctgcatcctgacgggagtgcagtggtggtagtactgaacaggtctagcaaagatgttcccttgactatcaaagacccagctgtgggctttctggaaaccatttcccctggatactctatccacacctatctctggagaagacag

SEQ ID NO: 1526 - protein, 536 aa, synthetic construct
  REGION 1..536: note = Variant of B-Glucocerebrosidase
MEFSSPSREECPKPLSRVSIMAGSLTGLLLLQAVSWASGARPCIPKSFGYSSVVCVCNATYCDSVDPLTLPALGTFSRYESTRSGRRMELSMGPIQANRTGTGLLLTLQPEQKFQKVKGFGGAMTDAAALNILALSPPAQNLLLKSYFSEEGIEYNIIRVPMASCDFSIRTYTYADTPDDFQLHNFSLPEEDTKWKIPLIHRALQLSQRPVSLFASPWTSPTWLKTNGAFNGKGSLKGQPGDIYHQTWARYFVKFLDAYAEHGLQFWAVTAENEPSAGLLSGYPFQCLGFTPEHQRDFIARDLGPTLANSTHHNVRLLILDDQRLLLPHWAKVVLTNPEAAKYVHGIAVHWYLDFLAPAKWTLGETHRLFPNTTLFASEACVGSKFWEQSVRLGSWDRGMQYSHSIIENLLYHVVGWTDWNLALNPEGGPNWVRNFVDSPIIVDITKDTFYKQPMFYHLGHFSKFIPEGSTRVGLVASQKNDLDAVALLHPDGSAVVVVLNRSSKDVPLTIKDPAVGFLETISPGYSIHTYLWRRQ

SEQ ID NO: 1527 - DNA, 1608 bp, synthetic construct
  misc_feature 1..1608: note = Variant of B-Glucocerebrosidase
  source 1..1608: mol_type = other DNA
atggagttttcttctcctagtagagaagaatgccccaagccactgagcagggtgagcatcatggctggatccctcacagggctgcttcttttgcaggcagtctcatgggcctctggagccaggccctgtattcccaagtcattcggctactcctcagtggtgtgtgtatgcaatgccacctattgtgacagtgtcgatcctacaactctccctgctctgggtaccttctcccggtatgagagcacaagaagtggaagacgcatggagctctcaatgggccctatacaggctaaccgcactgggacaggtctgctgctgaccctccaacctgaacagaagtttcagaaagtcaagggatttggaggagccatgactgatgcagcagcactcaacatcttggccctgtctccaccagcccagaacctgctgttgaagtcctacttctcagaggaggggattgagtacaacatcatccgggttcccatggctagctgtgacttctccattaggacctatacatacgctgacacccccgatgattttcagctccataatttcagtctccctgaagaagacaccaaatggaagatacctctgattcacagagccttgcaactgtcccaaaggccagtgagcctcttcgcttctccctggactagtcctacatggctgaagactaatggtgcttacaatgggaagggctccctgaaaggacagccaggtgacatatatcatcagacatgggcccgctactttgtgaaattccttgatgcctatgcagagcacgggctccaattctgggcagtcaccgcagaaaacgagccctcagctgggctgctgtctggctacccctttcagtgcttgggctttactcctgagcatcaacgggacttcattgcccgggatttggggccaacactggccaacagcacccaccacaatgtaagactcctcattctggatgaccagaggctgctgctccctcattgggccaaggtggtgttgacaaacccagaagctgccaaatatgttcatggcatcgctgtccactggtacctggattttttggcccctgccaagtggactctgggagagacccacagactcttccccaataccacactgtttgcatcagaagcctgcgtggggagcaaattctgggagcagtctgttaggctgggttcctgggatcggggcatgcaatattcccatagtataatagagaacctcctctaccacgtggtaggatggacagactggaatctggctttgaacccagaaggaggccccaattgggtgcgcaactttgttgacagccccatcattgtggatatcacaaaggacaccttctacaaacagcctatgttctatcatctggggcactttagcaagttcattccagagggttccactagagtaggcttggttgcctcacagaagaatgatctggatgctgtggcactcctgcatcctgacgggagtgcagtggtggtagtactgaacaggtctagcaaagatgttcccttgactatcaaagacccagctgtgggctttctggaaaccatttcccctggatactctatccacacctatctctggagaagacag

SEQ ID NO: 1528 - protein, 536 aa, synthetic construct
  REGION 1..536: note = Variant of B-Glucocerebrosidase
MEFSSPSREECPKPLSRVSIMAGSLTGLLLLQAVSWASGARPCIPKSFGYSSVVCVCNATYCDSVDPTTLPALGTFSRYESTRSGRRMELSMGPIQANRTGTGLLLTLQPEQKFQKVKGFGGAMTDAAALNILALSPPAQNLLLKSYFSEEGIEYNIIRVPMASCDFSIRTYTYADTPDDFQLHNFSLPEEDTKWKIPLIHRALQLSQRPVSLFASPWTSPTWLKTNGAYNGKGSLKGQPGDIYHQTWARYFVKFLDAYAEHGLQFWAVTAENEPSAGLLSGYPFQCLGFTPEHQRDFIARDLGPTLANSTHHNVRLLILDDQRLLLPHWAKVVLTNPEAAKYVHGIAVHWYLDFLAPAKWTLGETHRLFPNTTLFASEACVGSKFWEQSVRLGSWDRGMQYSHSIIENLLYHVVGWTDWNLALNPEGGPNWVRNFVDSPIIVDITKDTFYKQPMFYHLGHFSKFIPEGSTRVGLVASQKNDLDAVALLHPDGSAVVVVLNRSSKDVPLTIKDPAVGFLETISPGYSIHTYLWRRQ

SEQ ID NO: 1529 - DNA, 1608 bp, synthetic construct
  misc_feature 1..1608: note = Variant of B-Glucocerebrosidase
  source 1..1608: mol_type = other DNA
atggagttttcttctcctagtagagaagaatgccccaagccactgagcagggtgagcatcatggctggatccctcacagggctgcttcttttgcaggcagtctcatgggcctctggagccaggccctgtattcccaagtcattcggctactcctcagtggtgtgtgtatgcaatgccacctattgtgacagtgtcgatcctctcactctccctgctctgggtaccttctcccggtatgagagcacaagaagtggaagacgcatggagctctcaatgggccctatacaggctaaccgcactgggacaggtctgctgctgaccctccaacctgaacagaagtttcagaaagtcaagggatttggaggagccatgactgatgcagcagcactcaacatcttggccctgtctccaccagcccaggaactgctgttgaagtcctacttctcagaggaggggattgagtacaacatcatccgggttcccatggctagctgtgacttctccattaggacctatacatacgctgacacccccgatgattttcagctccataatttcagtctccctgaagaagacaccaaatggaagatacctctgattcacagagccttgcaactgtcccaaaggccagtgagcctcttcgcttctccctggactagtcctacatggctgaagactaatggtgcttacaatgggaagggctccctgaaaggacagccaggtgacatatatcatcagacatgggcccgctactttgtgaaattccttgatgcctatgcagagcacgggctccaattctgggcagtcaccgcagaaaacgagccctcagctgggctgctgtctggctacccctttcagtgcttgggctttactcctgagcatcaacgggacttcattgcccgggatttggggccaacactggccaacagcacccaccacaatgtaagactcctcattctggatgaccagaggctgctgctccctcattgggccaaggtggtgttgacaaacccagaagctgccaaatatgttcatggcatcgctgtccactggtacctggattttttggcccctgccaagtggactctgggagagacccacagactcttccccaataccacactgtttgcatcagaagcctgcgtggggagcaaattctgggagcagtctgttaggctgggttcctgggatcggggcatgcaatattcccatagtataatagagaacctcctctaccacgtggtaggatggacagactggaatctggctttgaacccagaaggaggccccaattgggtgcgcaactttgttgacagccccatcattgtggatatcacaaaggacaccttctacaaacagcctatgttctatcatctggggcactttagcaagttcattccagagggttccactagagtaggcttggttgcctcacagaagaatgatctggatgctgtggcactcctgcatcctgacgggagtgcagtggtggtagtactgaacaggtctagcaaagatgttcccttgactatcaaagacccagctgtgggctttctggaaaccatttcccctggatactctatccacacctatctctggagaagacag

SEQ ID NO: 1530 - protein, 536 aa, synthetic construct
  REGION 1..536: note = Variant of B-Glucocerebrosidase
MEFSSPSREECPKPLSRVSIMAGSLTGLLLLQAVSWASGARPCIPKSFGYSSVVCVCNATYCDSVDPLTLPALGTFSRYESTRSGRRMELSMGPIQANRTGTGLLLTLQPEQKFQKVKGFGGAMTDAAALNILALSPPAQELLLKSYFSEEGIEYNIIRVPMASCDFSIRTYTYADTPDDFQLHNFSLPEEDTKWKIPLIHRALQLSQRPVSLFASPWTSPTWLKTNGAYNGKGSLKGQPGDIYHQTWARYFVKFLDAYAEHGLQFWAVTAENEPSAGLLSGYPFQCLGFTPEHQRDFIARDLGPTLANSTHHNVRLLILDDQRLLLPHWAKVVLTNPEAAKYVHGIAVHWYLDFLAPAKWTLGETHRLFPNTTLFASEACVGSKFWEQSVRLGSWDRGMQYSHSIIENLLYHVVGWTDWNLALNPEGGPNWVRNFVDSPIIVDITKDTFYKQPMFYHLGHFSKFIPEGSTRVGLVASQKNDLDAVALLHPDGSAVVVVLNRSSKDVPLTIKDPAVGFLETISPGYSIHTYLWRRQ

SEQ ID NO: 1531 - DNA, 1608 bp, synthetic construct
  misc_feature 1..1608: note = Variant of B-Glucocerebrosidase
  source 1..1608: mol_type = other DNA
atggagttttcttctcctagtagagaagaatgccccaagccactgagcagggtgagcatcatggctggatccctcacagggctgcttcttttgcaggcagtctcatgggcctctggagccaggccctgtattcccaagtcattcggctactcctcagtggtgtgtgtatgcaatgccacctattgtgacagtgtcgatcctctcactctccctgctctgggtaccttctcccggtatgagagcacaagaagtggaagacgcatggagctctcaatgggccctatacaggagaaccgcactgggacaggtctgctgctgaccctccaacctgaacagaagtttcagaaagtcaagggatttggaggagccatgactgatgcagcagcactcaacatcttggccctgtctccaccagcccagaacctgctgttgaagtcctacttctcagaggaggggattgagtacaacatcatccgggttcccatggctagctgtgacttctccattaggacctatacatacgctgacacccccgatgattttcagctccataatttcagtctccctgaagaagacaccaaatggaagatacctctgattcacagagccttgcaactgtcccaaaggccagtgagcctcttcgcttctccctggactagtcctacatggctgaagactaatggtgcttacaatgggaagggctccctgaaaggacagccaggtgacatatatcatcagacatgggcccgctactttgtgaaattccttgatgcctatgcagagcacgggctccaattctgggcagtcaccgcagaaaacgagccctcagctgggctgctgtctggctacccctttcagtgcttgggctttactcctgagcatcaacgggacttcattgcccgggatttggggccaacactggccaacagcacccaccacaatgtaagactcctcattctggatgaccagaggctgctgctccctcattgggccaaggtggtgttgacaaacccagaagctgccaaatatgttcatggcatcgctgtccactggtacctggattttttggcccctgccaagtggactctgggagagacccacagactcttccccaataccacactgtttgcatcagaagcctgcgtggggagcaaattctgggagcagtctgttaggctgggttcctgggatcggggcatgcaatattcccatagtataatagagaacctcctctaccacgtggtaggatggacagactggaatctggctttgaacccagaaggaggccccaattgggtgcgcaactttgttgacagccccatcattgtggatatcacaaaggacaccttctacaaacagcctatgttctatcatctggggcactttagcaagttcattccagagggttccactagagtaggcttggttgcctcacagaagaatgatctggatgctgtggcactcctgcatcctgacgggagtgcagtggtggtagtactgaacaggtctagcaaagatgttcccttgactatcaaagacccagctgtgggctttctggaaaccatttcccctggatactctatccacacctatctctggagaagacag

SEQ ID NO: 1532 - protein, 536 aa, synthetic construct
  REGION 1..536: note = Variant of B-Glucocerebrosidase
MEFSSPSREECPKPLSRVSIMAGSLTGLLLLQAVSWASGARPCIPKSFGYSSVVCVCNATYCDSVDPLTLPALGTFSRYESTRSGRRMELSMGPIQENRTGTGLLLTLQPEQKFQKVKGFGGAMTDAAALNILALSPPAQNLLLKSYFSEEGIEYNIIRVPMASCDFSIRTYTYADTPDDFQLHNFSLPEEDTKWKIPLIHRALQLSQRPVSLFASPWTSPTWLKTNGAYNGKGSLKGQPGDIYHQTWARYFVKFLDAYAEHGLQFWAVTAENEPSAGLLSGYPFQCLGFTPEHQRDFIARDLGPTLANSTHHNVRLLILDDQRLLLPHWAKVVLTNPEAAKYVHGIAVHWYLDFLAPAKWTLGETHRLFPNTTLFASEACVGSKFWEQSVRLGSWDRGMQYSHSIIENLLYHVVGWTDWNLALNPEGGPNWVRNFVDSPIIVDITKDTFYKQPMFYHLGHFSKFIPEGSTRVGLVASQKNDLDAVALLHPDGSAVVVVLNRSSKDVPLTIKDPAVGFLETISPGYSIHTYLWRRQ

SEQ ID NO: 1533 - DNA, 1608 bp, synthetic construct
  misc_feature 1..1608: note = Variant of B-Glucocerebrosidase
  source 1..1608: mol_type = other DNA
atggagttttcttctcctagtagagaagaatgccccaagccactgagcagggtgagcatcatggctggatccctcacagggctgcttcttttgcaggcagtctcatgggcctctggagccaggccctgtattcccaagtcattcggctactcctcagtggtgtgtgtatgcaatgccacctattgtgacagtgtcgatcctctcactctccctgctctgggtaccttctcccggtatgagagcacaagaagtggaagacgcatggagctctcaatgggccctatacaggctaaccgcactgggacaggtctgctgctgaccctccaacctgaacagaagtttcagaaagtcaagggatttggaggagccatgactgatgcagcagcactcaacatcttggccctgtctccaccagcccagaacctgctgttgaagtcctacttctcagaggaggggattgagtacaacatcatccgggttcccatggctagctgtgacttctccattaggacctatacatacgctgacacccccgatgattttcagctccataatttcagtctccctgaagaagacaccaaatggaagatacctctgattcacagagccttgcaactgtcccaaaggccagtgagcctcttcgcttctccctggactagtcctacatggctgaagactaatggtgcttacaatgggaagggctccctgaaaggacagccaggtgacatatatcatcagacatgggcccgctactttgtgaaattccttgatgcctatgcagagcacgggctccaattctgggcagtcaccgcagaaaacgagccctcagctgggctgctgtctggctacccctttcagtgcttgggctttactcctgagcatcaacgggacttcattgcccgggatttggggccaacactggccaacagcacccaccacaatgtacatctcctcattctggatgaccagaggctgctgctccctcattgggccaaggtggtgttgacaaacccagaagctgccaaatatgttcatggcatcgctgtccactggtacctggattttttggcccctgccaagtggactctgggagagacccacagactcttccccaataccacactgtttgcatcagaagcctgcgtggggagcaaattctgggagcagtctgttaggctgggttcctgggatcggggcatgcaatattcccatagtataatagagaacctcctctaccacgtggtaggatggacagactggaatctggctttgaacccagaaggaggccccaattgggtgcgcaactttgttgacagccccatcattgtggatatcacaaaggacaccttctacaaacagcctatgttctatcatctggggcactttagcaagttcattccagagggttccactagagtaggcttggttgcctcacagaagaatgatctggatgctgtggcactcctgcatcctgacgggagtgcagtggtggtagtactgaacaggtctagcaaagatgttcccttgactatcaaagacccagctgtgggctttctggaaaccatttcccctggatactctatccacacctatctctggagaagacag

SEQ ID NO: 1534 - protein, 536 aa, synthetic construct
  REGION 1..536: note = Variant of B-Glucocerebrosidase
MEFSSPSREECPKPLSRVSIMAGSLTGLLLLQAVSWASGARPCIPKSFGYSSVVCVCNATYCDSVDPLTLPALGTFSRYESTRSGRRMELSMGPIQANRTGTGLLLTLQPEQKFQKVKGFGGAMTDAAALNILALSPPAQNLLLKSYFSEEGIEYNIIRVPMASCDFSIRTYTYADTPDDFQLHNFSLPEEDTKWKIPLIHRALQLSQRPVSLFASPWTSPTWLKTNGAYNGKGSLKGQPGDIYHQTWARYFVKFLDAYAEHGLQFWAVTAENEPSAGLLSGYPFQCLGFTPEHQRDFIARDLGPTLANSTHHNVHLLILDDQRLLLPHWAKVVLTNPEAAKYVHGIAVHWYLDFLAPAKWTLGETHRLFPNTTLFASEACVGSKFWEQSVRLGSWDRGMQYSHSIIENLLYHVVGWTDWNLALNPEGGPNWVRNFVDSPIIVDITKDTFYKQPMFYHLGHFSKFIPEGSTRVGLVASQKNDLDAVALLHPDGSAVVVVLNRSSKDVPLTIKDPAVGFLETISPGYSIHTYLWRRQ

SEQ ID NO: 1535 - DNA, 1608 bp, synthetic construct
  misc_feature 1..1608: note = Variant of B-Glucocerebrosidase
  source 1..1608: mol_type = other DNA
atggagttttcttctcctagtagagaagaatgccccaagccactgagcagggtgagcatcatggctggatccctcacagggctgcttcttttgcaggcagtctcatgggcctctggagccaggccctgtattcccaagtcattcggctactcctcagtggtgtgtgtatgcaatgccacctattgtgacagtgtcgatcctctcactctccctgctctgggtaccttctcccggtatgagagcacaagaagtggaagacgcatggagctctcaatgggccctatacaggctaaccgcactgggacaggtctgctgctgaccctccaacctgaacagaagtttcagaaagtcaagggatttggaggagccatgactgatgcagcagcactcaacatcttggccctgtctccaccagcccagaacctgctgttgaagtcctacttctcagaggaggggattgagtacaacatcatccgggttcccatggctagctgtgacttctccattaggacctatacatacgctgacacccccgatgattttcagctccataatttcagtctccctgaagaagacaccaaatggaagatacctctgattcacagagccttgcaactgtcccaaaggccagtgagcctcttcgcttctccctggactagtcctacatggctgaagactaatggtgcttacaatgggaagggctccctgaaaggacagccaggtgacatatatcatcagacatgggcccgctactttgtgaaattccttgatgcctatgcagagcacgggctccaattctgggcagtcaccgcagaaaacgagccctcagctgggctgctgtctggctacccctttcagtgcttgggctttactcctgagcatcaacgggacttcattgcccgggatttggggccaacactggccaacagcacccaccacaatgtaagactcctcattctggatgaccagaggctgctgctccctcattgggccaaggtggtgttgacaaacccagaagctgccaaatatgttcatggcatcgctgtccactggtacctggattttttggcccctgccaagtggactctgggagagacccacagactcttccccaataccacactgtttgcatcagaagcctgcgtggggagcaaattctgggagcagtctgttaggctgggttcctgggatcggggcatgcaatattcccatagtataatagagaacctcctctaccacgtggtaggatggacagactggaatctggctttgaacccagaaggaggccccaattgggtgcgcaactttgttgacagccccatcattgtggatatcacaaaggacaccttctacaaacagcctatgttctatcatctggggcactttagcaagttcattccagagggttccactagagtaggcttggttgcctcacagaagaatgatctggatgctgtggcactcctgcatcctgacgggagtgcagtggtggtagtactgaacaggtctagcaaagatgttcccttgactatcaaagacccagctgtgggctttctggaaaccagctcccctggatactctatccacacctatctctggagaagacag

SEQ ID NO: 1536 - protein, 536 aa, synthetic construct
  REGION 1..536: note = Variant of B-Glucocerebrosidase
MEFSSPSREECPKPLSRVSIMAGSLTGLLLLQAVSWASGARPCIPKSFGYSSVVCVCNATYCDSVDPLTLPALGTFSRYESTRSGRRMELSMGPIQANRTGTGLLLTLQPEQKFQKVKGFGGAMTDAAALNILALSPPAQNLLLKSYFSEEGIEYNIIRVPMASCDFSIRTYTYADTPDDFQLHNFSLPEEDTKWKIPLIHRALQLSQRPVSLFASPWTSPTWLKTNGAYNGKGSLKGQPGDIYHQTWARYFVKFLDAYAEHGLQFWAVTAENEPSAGLLSGYPFQCLGFTPEHQRDFIARDLGPTLANSTHHNVRLLILDDQRLLLPHWAKVVLTNPEAAKYVHGIAVHWYLDFLAPAKWTLGETHRLFPNTTLFASEACVGSKFWEQSVRLGSWDRGMQYSHSIIENLLYHVVGWTDWNLALNPEGGPNWVRNFVDSPIIVDITKDTFYKQPMFYHLGHFSKFIPEGSTRVGLVASQKNDLDAVALLHPDGSAVVVVLNRSSKDVPLTIKDPAVGFLETSSPGYSIHTYLWRRQ

SEQ ID NO: 1537 - DNA, 1608 bp, synthetic construct
  misc_feature 1..1608: note = Variant of B-Glucocerebrosidase
  source 1..1608: mol_type = other DNA
atggagttttcttctcctagtagagaagaatgccccaagccactgagcagggtgagcatcatggctggatccctcacagggctgcttcttttgcaggcagtctcatgggcctctggagccaggccctgtattcccaagtcattcggctactcctcagtggtgtgtgtatgcaatgccacctattgtgacagtgtcgatcctctcactctccctgctctgggtaccttctcccggtatgagagcacaagaagtggaagacgcatggagctctcaatgggccctatacaggctaaccgcactgggacaggtctgctgctgaccctccaacctgaacagaagtttcagaaagtcaagggatttggaggagccatgactgatgcagcagcactcaacatcttggccctgtctccaccagcccagaacctgctgttgaagtcctacttctcagaggaggggattgagtacaacatcatccgggttcccatggctagctgtgacttctccattaggacctatacatacgctgacacccccgatgattttcagctccataatttcagtctccctgaagaagacaccaaatggaagatacctctgattcacagagccttgcaactgtcccaaaggccagtgagcctcttcgcttctccctggactagtcctacatggatgaagactaatggtgcttacaatgggaagggctccctgaaaggacagccaggtgacatatatcatcagacatgggcccgctactttgtgaaattccttgatgcctatgcagagcacgggctccaattctgggcagtcaccgcagaaaacgagccctcagctgggctgctgtctggctacccctttcagtgcttgggctttactcctgagcatcaacgggacttcattgcccgggatttggggccaacactggccaacagcacccaccacaatgtaagactcctcattctggatgaccagaggctgctgctccctcattgggccaaggtggtgttgacaaacccagaagctgccaaatatgttcatggcatcgctgtccactggtacctggattttttggcccctgccaagtggactctgggagagacccacagactcttccccaataccacactgtttgcatcagaagcctgcgtggggagcaaattctgggagcagtctgttaggctgggttcctgggatcggggcatgcaatattcccatagtataatagagaacctcctctaccacgtggtaggatggacagactggaatctggctttgaacccagaaggaggccccaattgggtgcgcaactttgttgacagccccatcattgtggatatcacaaaggacaccttctacaaacagcctatgttctatcatctggggcactttagcaagttcattccagagggttccactagagtaggcttggttgcctcacagaagaatgatctggatgctgtggcactcctgcatcctgacgggagtgcagtggtggtagtactgaacaggtctagcaaagatgttcccttgactatcaaagacccagctgtgggctttctggaaaccatttcccctggatactctatccacacctatctctggagaagacag

SEQ ID NO: 1538 - protein, 536 aa, synthetic construct
  REGION 1..536: note = Variant of B-Glucocerebrosidase
MEFSSPSREECPKPLSRVSIMAGSLTGLLLLQAVSWASGARPCIPKSFGYSSVVCVCNATYCDSVDPLTLPALGTFSRYESTRSGRRMELSMGPIQANRTGTGLLLTLQPEQKFQKVKGFGGAMTDAAALNILALSPPAQNLLLKSYFSEEGIEYNIIRVPMASCDFSIRTYTYADTPDDFQLHNFSLPEEDTKWKIPLIHRALQLSQRPVSLFASPWTSPTWMKTNGAYNGKGSLKGQPGDIYHQTWARYFVKFLDAYAEHGLQFWAVTAENEPSAGLLSGYPFQCLGFTPEHQRDFIARDLGPTLANSTHHNVRLLILDDQRLLLPHWAKVVLTNPEAAKYVHGIAVHWYLDFLAPAKWTLGETHRLFPNTTLFASEACVGSKFWEQSVRLGSWDRGMQYSHSIIENLLYHVVGWTDWNLALNPEGGPNWVRNFVDSPIIVDITKDTFYKQPMFYHLGHFSKFIPEGSTRVGLVASQKNDLDAVALLHPDGSAVVVVLNRSSKDVPLTIKDPAVGFLETISPGYSIHTYLWRRQ

SEQ ID NO: 1539 - DNA, 1608 bp, synthetic construct
  misc_feature 1..1608: note = Variant of B-Glucocerebrosidase
  source 1..1608: mol_type = other DNA
atggagttttcttctcctagtagagaagaatgccccaagccactgagcagggtgagcatcatggctggatccctcacagggctgcttcttttgcaggcagtctcatgggcctctggagccaggccctgtattcccaagtcattcggctactcctcagtggtgtgtgtatgcaatgccacctattgtgacagtgtcgatcctctcactctccctgctctgggtaccttctcccggtatgagagcacaagaagtggaagacgcatggagctctcaatgggccctatacaggctaaccgcactgggacaggtctgctgctgaccctccaacctgaacagaagtttcagaaagtcaagggatttggaggagccatgactgatgcagcagcactcaacatcttggccctgtctccaccagcccagaacctgctgttgaagtcctacttctcagaggaggggattgagtacaacatcatccgggttcccatggctagctgtgacttctccattaggacctatacatacgctgacacccccgatgattttcagctccataatttcagtctccctgaagaagacaccaaatggaagatacctctgattcacagagccttgcaactgtcccaaaggccagtgagcctcttcgcttctccctggactagtcctacatggctgaagactaatggtgcttacaatgggaagggctccctgaaaggacagccaggtgacatatatcatcagacatgggcccgctactttgtgaaattccttgatgcctatgcagagcacgggctccaattctgggcagtcaccgcagaaaacgagccctcagctgggctgctgtctggctacccctttcagtgcttgggctttactcctgagcatcaacgggacttcattgcccgggatttggggccaacactggccaacagcacccaccacaatgtaagactcctcattctggatgaccagaggctgctgctccctcattgggccaaggtggtgttgacaaacccagaagctgccaaatatgttcatggcatcgctgtccactggtacctggattttttggcccctgccaagtggactctgggagagacccacagactcttccccaataccacactgtttgcatcagaagcctgcgtggggagcaaattctgggagcagtctgttaggctgggttcctgggatcggggcatgcaatattcccatagtataatagagaacctcctctaccacgtggtaggatggacagactggaatctggctttgaacccagaaggaggccccaattgggtgcgcaactttgttgacagccccatcattgtggatatcacaaaggacaccttctacaaacagcctatgttctatcatctggggcactttagcaagttcattccagagggttccactagagtaggcttggttgccaaccagaagaatgatctggatgctgtggcactcctgcatcctgacgggagtgcagtggtggtagtactgaacaggtctagcaaagatgttcccttgactatcaaagacccagctgtgggctttctggaaaccatttcccctggatactctatccacacctatctctggagaagacag

SEQ ID NO: 1540 - protein, 536 aa, synthetic construct
  REGION 1..536: note = Variant of B-Glucocerebrosidase
MEFSSPSREECPKPLSRVSIMAGSLTGLLLLQAVSWASGARPCIPKSFGYSSVVCVCNATYCDSVDPLTLPALGTFSRYESTRSGRRMELSMGPIQANRTGTGLLLTLQPEQKFQKVKGFGGAMTDAAALNILALSPPAQNLLLKSYFSEEGIEYNIIRVPMASCDFSIRTYTYADTPDDFQLHNFSLPEEDTKWKIPLIHRALQLSQRPVSLFASPWTSPTWLKTNGAYNGKGSLKGQPGDIYHQTWARYFVKFLDAYAEHGLQFWAVTAENEPSAGLLSGYPFQCLGFTPEHQRDFIARDLGPTLANSTHHNVRLLILDDQRLLLPHWAKVVLTNPEAAKYVHGIAVHWYLDFLAPAKWTLGETHRLFPNTTLFASEACVGSKFWEQSVRLGSWDRGMQYSHSIIENLLYHVVGWTDWNLALNPEGGPNWVRNFVDSPIIVDITKDTFYKQPMFYHLGHFSKFIPEGSTRVGLVANQKNDLDAVALLHPDGSAVVVVLNRSSKDVPLTIKDPAVGFLETISPGYSIHTYLWRRQ

SEQ ID NO: 1541 - DNA, 1608 bp, synthetic construct
  misc_feature 1..1608: note = Variant of B-Glucocerebrosidase
  source 1..1608: mol_type = other DNA
atggagttttcttctcctagtagagaagaatgccccaagccactgagcagggtgagcatcatggctggatccctcacagggctgcttcttttgcaggcagtctcatgggcctctggagccaggccctgtattcccaagtcattcggctactcctcagtggtgtgtgtatgcaatgccacctattgtgacagtgtcgatcctctcactctccctgctctgggtaccttctcccggtatgagagcacaagaagtggaagacgcatggagctctcaatgggccctatacaggctaaccgcactgggacaggtctgctgctgaccctccaacctgaacagaagtttcagaaagtcaagggatttggaggagccatgactgatgcagcagcactcaacatcttggccctgtctccaccagcccagaacctgctgttgaagtcctacttctcagaggaggggattgagtacaacatcatccgggttcccatggctagctgtgacttctccattaggacctatacatacgctgacacccccgatgattttcagctccataatttcagtctccctgaagaagacaccaaatggaagatacctctgattcacagagccttgcaactgtcccaaaggccagtgagcctcttcgcttctccctggactagtcctacatggctgaagactaatggtgcttacaatgggaagggctccctgaaaggacagccaggtgacatatatcatcagacatgggcccgctactttgtgaaattccttgatgcctatgcagagcacgggctccaattctgggcagtcaccgcagaaaacgagccctcagctgggctgctgtctggctacccctttcagtgcttgggctttactcctgagcatcaacgggacttcattgcccgggatttggggccaacactggccaacagcacccaccacaatgtaagactcctcattctggatgaccagaggctgctgctccctcattgggccaaggtggtgttgacaaacccagaagctgccaaatatgttcatggcatcgctgtccactggtacctggattttttggcccctgccaagtggactctgggagagacccacagactcttccccaataccacactgtttgcatcagaagcctgcgtggggagcaaattctgggagcagtctgttaggctgggttcctgggatcggggcatgcaatattcccatagtataatagagaacctcctctaccacgtggtaggatggacagactggaatctggctttgaacccagaaggaggccccaattgggtgcgcaactttgttgacagccccatcattgtggatatcacaaaggacaccttctacaaacagcctatgttctatcatctggggcactttagcaagttcattccagagggttccactagagtaggcttggttgcctcacaggggaatgatctggatgctgtggcactcctgcatcctgacgggagtgcagtggtggtagtactgaacaggtctagcaaagatgttcccttgactatcaaagacccagctgtgggctttctggaaaccatttcccctggatactctatccacacctatctctggagaagacag

SEQ ID NO: 1542 - protein, 536 aa, synthetic construct
  REGION 1..536: note = Variant of B-Glucocerebrosidase
MEFSSPSREECPKPLSRVSIMAGSLTGLLLLQAVSWASGARPCIPKSFGYSSVVCVCNATYCDSVDPLTLPALGTFSRYESTRSGRRMELSMGPIQANRTGTGLLLTLQPEQKFQKVKGFGGAMTDAAALNILALSPPAQNLLLKSYFSEEGIEYNIIRVPMASCDFSIRTYTYADTPDDFQLHNFSLPEEDTKWKIPLIHRALQLSQRPVSLFASPWTSPTWLKTNGAYNGKGSLKGQPGDIYHQTWARYFVKFLDAYAEHGLQFWAVTAENEPSAGLLSGYPFQCLGFTPEHQRDFIARDLGPTLANSTHHNVRLLILDDQRLLLPHWAKVVLTNPEAAKYVHGIAVHWYLDFLAPAKWTLGETHRLFPNTTLFASEACVGSKFWEQSVRLGSWDRGMQYSHSIIENLLYHVVGWTDWNLALNPEGGPNWVRNFVDSPIIVDITKDTFYKQPMFYHLGHFSKFIPEGSTRVGLVASQGNDLDAVALLHPDGSAVVVVLNRSSKDVPLTIKDPAVGFLETISPGYSIHTYLWRRQ

SEQ ID NO: 1543 - DNA, 1608 bp, synthetic construct
  misc_feature 1..1608: note = Variant of B-Glucocerebrosidase
  source 1..1608: mol_type = other DNA
atggagttttcttctcctagtagagaagaatgccccaagccactgagcagggtgagcatcatggctggatccctcacagggctgcttcttttgcaggcagtctcatgggcctctggagccaggccctgtattcccaagtcattcggctactcctcagtggtgtgtgtatgcaatgccacctattgtgacagtgtcgatcctctcactctccctgctctgggtaccttctcccggtatgagagcacaagaagtggaagacgcatggagctctcaatgggccctatacaggctaaccgcactgggacaggtctgctgctgaccctccaacctgaacagaagtttcagaaagtcaagggatttggaggagccatgactgatgcagcagcactcaacatcttggccctgtctccaccagcccagaacctgctgttgaagtcctacttctcagaggaggggattgagtacaacatcatccgggttcccatggctagctgtgacttctccattaggacctatacatacgctgacacccccgatgattttcagctccataatttcagtctccctgaagaagacaccaaatggaagatacctctgattcacagagccttgcaactgtcccaaaggccagtgagcctcttcgcttctccctggactagtcctacatggctgaagactaatggtgcttacaatgggaagggctccctgaaaggacagccaggtgacatatatcatcagacatgggcccgctactttgtgaaattccttgatgcctatgcagagcacgggctccaattctgggcagtcaccgcagaaaacgagccctcagctgggctgctgtctggctacccctttcagtgcttgggctttactcctgagcatcaacgggacttcattgcccgggatttggggccaacactggccaacagcacccaccacaatgtaagactcctcattctggatgaccagaggctgctgctccctcattgggccaaggtggtgttgacaaacccagaagctgccaaatatgttcatggcatcgctgtccactggtacctggattttttggcccctgccaagtggactctgggagagacccacgacctcttccccaataccacactgtttgcatcagaagcctgcgtggggagcaaattctgggagcagtctgttaggctgggttcctgggatcggggcatgcaatattcccatagtataatagagaacctcctctaccacgtggtaggatggacagactggaatctggctttgaacccagaaggaggccccaattgggtgcgcaactttgttgacagccccatcattgtggatatcacaaaggacaccttctacaaacagcctatgttctatcatctggggcactttagcaagttcattccagagggttccactagagtaggcttggttgcctcacagaagaatgatctggatgctgtggcactcctgcatcctgacgggagtgcagtggtggtagtactgaacaggtctagcaaagatgttcccttgactatcaaagacccagctgtgggctttctggaaaccatttcccctggatactctatccacacctatctctggagaagacag

SEQ ID NO: 1544 - protein, 536 aa, synthetic construct
  REGION 1..536: note = Variant of B-Glucocerebrosidase
MEFSSPSREECPKPLSRVSIMAGSLTGLLLLQAVSWASGARPCIPKSFGYSSVVCVCNATYCDSVDPLTLPALGTFSRYESTRSGRRMELSMGPIQANRTGTGLLLTLQPEQKFQKVKGFGGAMTDAAALNILALSPPAQNLLLKSYFSEEGIEYNIIRVPMASCDFSIRTYTYADTPDDFQLHNFSLPEEDTKWKIPLIHRALQLSQRPVSLFASPWTSPTWLKTNGAYNGKGSLKGQPGDIYHQTWARYFVKFLDAYAEHGLQFWAVTAENEPSAGLLSGYPFQCLGFTPEHQRDFIARDLGPTLANSTHHNVRLLILDDQRLLLPHWAKVVLTNPEAAKYVHGIAVHWYLDFLAPAKWTLGETHDLFPNTTLFASEACVGSKFWEQSVRLGSWDRGMQYSHSIIENLLYHVVGWTDWNLALNPEGGPNWVRNFVDSPIIVDITKDTFYKQPMFYHLGHFSKFIPEGSTRVGLVASQKNDLDAVALLHPDGSAVVVVLNRSSKDVPLTIKDPAVGFLETISPGYSIHTYLWRRQ

SEQ ID NO: 1545 - DNA, 1608 bp, synthetic construct
  misc_feature 1..1608: note = Variant of B-Glucocerebrosidase
  source 1..1608: mol_type = other DNA
atggagttttcttctcctagtagagaagaatgccccaagccactgagcagggtgagcatcatggctggatccctcacagggctgcttcttttgcaggcagtctcatgggcctctggagccaggccctgtattcccaagtcattcggctactcctcagtggtgtgtgtatgcaatgccacctattgtgacagtgtcgatcctctcactctccctgctctgggtaccttctcccggtatgagagcacaagaagtggacatcgcatggagctctcaatgggccctatacaggctaaccgcactgggacaggtctgctgctgaccctccaacctgaacagaagtttcagaaagtcaagggatttggaggagccatgactgatgcagcagcactcaacatcttggccctgtctccaccagcccagaacctgctgttgaagtcctacttctcagaggaggggattgagtacaacatcatccgggttcccatggctagctgtgacttctccattaggacctatacatacgctgacacccccgatgattttcagctccataatttcagtctccctgaagaagacaccaaatggaagatacctctgattcacagagccttgcaactgtcccaaaggccagtgagcctcttcgcttctccctggactagtcctacatggctgaagactaatggtgcttacaatgggaagggctccctgaaaggacagccaggtgacatatatcatcagacatgggcccgctactttgtgaaattccttgatgcctatgcagagcacgggctccaattctgggcagtcaccgcagaaaacgagccctcagctgggctgctgtctggctacccctttcagtgcttgggctttactcctgagcatcaacgggacttcattgcccgggatttggggccaacactggccaacagcacccaccacaatgtaagactcctcattctggatgaccagaggctgctgctccctcattgggccaaggtggtgttgacaaacccagaagctgccaaatatgttcatggcatcgctgtccactggtacctggattttttggcccctgccaagtggactctgggagagacccacagactcttccccaataccacactgtttgcatcagaagcctgcgtggggagcaaattctgggagcagtctgttaggctgggttcctgggatcggggcatgcaatattcccatagtataatagagaacctcctctaccacgtggtaggatggacagactggaatctggctttgaacccagaaggaggccccaattgggtgcgcaactttgttgacagccccatcattgtggatatcacaaaggacaccttctacaaacagcctatgttctatcatctggggcactttagcaagttcattccagagggttccactagagtaggcttggttgcctcacagaagaatgatctggatgctgtggcactcctgcatcctgacgggagtgcagtggtggtagtactgaacaggtctagcaaagatgttcccttgactatcaaagacccagctgtgggctttctggaaaccatttcccctggatactctatccacacctatctctggagaagacag

SEQ ID NO: 1546 - protein, 536 aa, synthetic construct
  REGION 1..536: note = Variant of B-Glucocerebrosidase
MEFSSPSREECPKPLSRVSIMAGSLTGLLLLQAVSWASGARPCIPKSFGYSSVVCVCNATYCDSVDPLTLPALGTFSRYESTRSGHRMELSMGPIQANRTGTGLLLTLQPEQKFQKVKGFGGAMTDAAALNILALSPPAQNLLLKSYFSEEGIEYNIIRVPMASCDFSIRTYTYADTPDDFQLHNFSLPEEDTKWKIPLIHRALQLSQRPVSLFASPWTSPTWLKTNGAYNGKGSLKGQPGDIYHQTWARYFVKFLDAYAEHGLQFWAVTAENEPSAGLLSGYPFQCLGFTPEHQRDFIARDLGPTLANSTHHNVRLLILDDQRLLLPHWAKVVLTNPEAAKYVHGIAVHWYLDFLAPAKWTLGETHRLFPNTTLFASEACVGSKFWEQSVRLGSWDRGMQYSHSIIENLLYHVVGWTDWNLALNPEGGPNWVRNFVDSPIIVDITKDTFYKQPMFYHLGHFSKFIPEGSTRVGLVASQKNDLDAVALLHPDGSAVVVVLNRSSKDVPLTIKDPAVGFLETISPGYSIHTYLWRRQ

SEQ ID NO: 1547 - DNA, 1608 bp, synthetic construct
  misc_feature 1..1608: note = Variant of B-Glucocerebrosidase
  source 1..1608: mol_type = other DNA
atggagttttcttctcctagtagagaagaatgccccaagccactgagcagggtgagcatcatggctggatccctcacagggctgcttcttttgcaggcagtctcatgggcctctggagccaggccctgtattcccaagtcattcggctactcctcagtggtgtgtgtatgcaatgccacctattgtgacagtgtcgatcctctcactctccctgctctgggtaccttctcccggtatgagagcacaagaagtggaagacgcatggagctctcaatgggccctatacaggctaaccgcactgggacaggtctgctgctgaccctccaacctgaacagaagtttcagaaagtcaagggatttggaggagccatgactgatgcagcagcactcaacatcttggccctgtctccaccagcccagaacctgctgttgaagtcctacttctcagaggaggggattgagtacaacatcatccgggttcccatggctagctgtgacttctccattaggacctatacatacgctgacacccccgatgattttcagctccataatttcagtctccctgaagaagacaccaaatggaagatacctctgattcacagagccttgcaactgtcccaaaggccagtgagcctcttcgcttctccctggactagtcctacatggctgaagactaatggtgcttacaatgggaagggctccctgaaaggacagccaggtgacatatatcatcagacatgggcccgctactttgtgaaattccttgatgcctatgcagagcacgggctccaattctgggcagtcaccgcagaaaacgagccctcagctgggctgctgtctggctacccctttcagtgcttgggctttactcctgagcatcaacgggacttcattgcccgggatttggggccaacactggccaacagcacccaccacaatgtaagactcctcattctggatgaccagaggctgctgctccctcattgggccaaggtggtgttgacaaacccagaagctgccaaatatgttcatggcatcgctgtccactggtacctggattttttggcccctgccaagtggactctgggagagacccacagactcttccccaataccacactgtttgcatcagaagcctgcgtggggagcaaattctgggagcagtctgttaggctgggttcctgggatcggggcatgcaatattcccatagtataatagagaacctcctcaaccacgtggtaggatggacagactggaatctggctttgaacccagaaggaggccccaattgggtgcgcaactttgttgacagccccatcattgtggatatcacaaaggacaccttctacaaacagcctatgttctatcatctggggcactttagcaagttcattccagagggttccactagagtaggcttggttgcctcacagaagaatgatctggatgctgtggcactcctgcatcctgacgggagtgcagtggtggtagtactgaacaggtctagcaaagatgttcccttgactatcaaagacccagctgtgggctttctggaaaccatttcccctggatactctatccacacctatctctggagaagacag

SEQ ID NO: 1548 - protein, 536 aa, synthetic construct
  REGION 1..536: note = Variant of B-Glucocerebrosidase
MEFSSPSREECPKPLSRVSIMAGSLTGLLLLQAVSWASGARPCIPKSFGYSSVVCVCNATYCDSVDPLTLPALGTFSRYESTRSGRRMELSMGPIQANRTGTGLLLTLQPEQKFQKVKGFGGAMTDAAALNILALSPPAQNLLLKSYFSEEGIEYNIIRVPMASCDFSIRTYTYADTPDDFQLHNFSLPEEDTKWKIPLIHRALQLSQRPVSLFASPWTSPTWLKTNGAYNGKGSLKGQPGDIYHQTWARYFVKFLDAYAEHGLQFWAVTAENEPSAGLLSGYPFQCLGFTPEHQRDFIARDLGPTLANSTHHNVRLLILDDQRLLLPHWAKVVLTNPEAAKYVHGIAVHWYLDFLAPAKWTLGETHRLFPNTTLFASEACVGSKFWEQSVRLGSWDRGMQYSHSIIENLLNHVVGWTDWNLALNPEGGPNWVRNFVDSPIIVDITKDTFYKQPMFYHLGHFSKFIPEGSTRVGLVASQKNDLDAVALLHPDGSAVVVVLNRSSKDVPLTIKDPAVGFLETISPGYSIHTYLWRRQ

SEQ ID NO: 1549 - DNA, 1608 bp, synthetic construct
  misc_feature 1..1608: note = Variant of B-Glucocerebrosidase
  source 1..1608: mol_type = other DNA
atggagttttcttctcctagtagagaagaatgccccaagccactgagcagggtgagcatcatggctggatccctcacagggctgcttcttttgcaggcagtctcatgggcctctggagccaggccctgtattcccaagtcattcggctactcctcagtggtgtgtgtatgcaatgccacctattgtgacagtgtcgatcctctcactctccctgctctgggtaccttctcccggtatgagagcacaagaagtggaagacgcatggagctctcaatgggccctatacaggctaaccgcactgggacaggtctgctgctgaccctccaacctgaacagaagtttcagaaagtcaagggatttggaggagccatgactgatgcagcagcactcaacatcttggccctgtctccaccagcccagaacctgctgttgaagtcctacttctcagaggaggggattgagtacaacatcatccgggttcccatggctagctgtgacttctccattaggacctatacatacgctgacacccccgatgattttcagctccataatttcagtctccctgaagaagacaccaaatggaagatacctctgattcacagagccttgcaactgtcccaaaggccagtgagcctcttcgcttctccctggactagtcctacatggctgaagactaatggtgcttacaatgggaagggctccctgaaaggacagccaggtgacatatatcatcagacatgggcccgctactttgtgaaattccttgatgcctatgcagagcacgggctccaattctgggcagtcaccgcagaaaacgagccctcagctgggctgctgtctggctacccctttcagtgcttgggctttactcctgagcatcaacgggacttcattgcccgggatttggggccaacactggccaacagcacccaccacaatgtaagactcctcattctggatgaccagaggctgctgctccctcattgggccaaggtggtgttgacaaacccagaagctgccaaatatgttcatggcatcgctgtccactggtacctggattttttggcccctgccaagtggactctgggagagacccacagactcttccccaataccacactgtttgcatcagaagcctgcgtggggagcaaattctgggagcagtctgttaggctgggttcctgggatcggggcatgcaatattcccatagtataatagagaacctcctctaccacgtggtaggatggacagactggaatctggctttgaacccagaaggaggccccaattgggtgcgcaactttgttgacagccccatcattgtggatatcacaaaggacagcttctacaaacagcctatgttctatcatctggggcactttagcaagttcattccagagggttccactagagtaggcttggttgcctcacagaagaatgatctggatgctgtggcactcctgcatcctgacgggagtgcagtggtggtagtactgaacaggtctagcaaagatgttcccttgactatcaaagacccagctgtgggctttctggaaaccatttcccctggatactctatccacacctatctctggagaagacag

SEQ ID NO: 1550 - protein, 536 aa, synthetic construct
  REGION 1..536: note = Variant of B-Glucocerebrosidase
MEFSSPSREECPKPLSRVSIMAGSLTGLLLLQAVSWASGARPCIPKSFGYSSVVCVCNATYCDSVDPLTLPALGTFSRYESTRSGRRMELSMGPIQANRTGTGLLLTLQPEQKFQKVKGFGGAMTDAAALNILALSPPAQNLLLKSYFSEEGIEYNIIRVPMASCDFSIRTYTYADTPDDFQLHNFSLPEEDTKWKIPLIHRALQLSQRPVSLFASPWTSPTWLKTNGAYNGKGSLKGQPGDIYHQTWARYFVKFLDAYAEHGLQFWAVTAENEPSAGLLSGYPFQCLGFTPEHQRDFIARDLGPTLANSTHHNVRLLILDDQRLLLPHWAKVVLTNPEAAKYVHGIAVHWYLDFLAPAKWTLGETHRLFPNTTLFASEACVGSKFWEQSVRLGSWDRGMQYSHSIIENLLYHVVGWTDWNLALNPEGGPNWVRNFVDSPIIVDITKDSFYKQPMFYHLGHFSKFIPEGSTRVGLVASQKNDLDAVALLHPDGSAVVVVLNRSSKDVPLTIKDPAVGFLETISPGYSIHTYLWRRQ

SEQ ID NO: 1551 - DNA, 1608 bp, synthetic construct
  misc_feature 1..1608: note = Variant of B-Glucocerebrosidase
  source 1..1608: mol_type = other DNA
atggagttttcttctcctagtagagaagaatgccccaagccactgagcagggtgagcatcatggctggatccctcacagggctgcttcttttgcaggcagtctcatgggcctctggagccaggccctgtattcccaagtcattcggctactcctcagtggtgtgtgtatgcaatgccacctattgtgacagtgtcgatcctctcactctccctgctctgggtaccttctcccggtatgagagcacaagaagtggaagacgcatggagctctcaatgggccctatacaggctaaccgcactgggacaggtctgctgctgaccctccaacctgaacagaagtttcagaaagtcaagggatttggaggagccatgactgatgcagcagcactcaacatcttggccctgtctccaccagcccagaacctgctgttgaagtcctacttctcagaggaggggattgagtacaacatcatccgggttcccatggctagctgtgacttctccattaggacctatacatacgctgacacccccgatgattttcagctccataatttcagtctccctgaagaagacaccaaatggaagatacctctgattcacagagccttgcaactgtcccaaaggccagtgagcctcttcgcttctccctggactagtcctacatggctgaagactaatggtgcttacaatgggaagggctccctgaaaggacagccaggtgacatatatcatcagacatgggcccgctactttgtgaaattccttgatgcctatgcagagcacgggctcaacttctgggcagtcaccgcagaaaacgagccctcagctgggctgctgtctggctacccctttcagtgcttgggctttactcctgagcatcaacgggacttcattgcccgggatttggggccaacactggccaacagcacccaccacaatgtaagactcctcattctggatgaccagaggctgctgctccctcattgggccaaggtggtgttgacaaacccagaagctgccaaatatgttcatggcatcgctgtccactggtacctggattttttggcccctgccaagtggactctgggagagacccacagactcttccccaataccacactgtttgcatcagaagcctgcgtggggagcaaattctgggagcagtctgttaggctgggttcctgggatcggggcatgcaatattcccatagtataatagagaacctcctctaccacgtggtaggatggacagactggaatctggctttgaacccagaaggaggccccaattgggtgcgcaactttgttgacagccccatcattgtggatatcacaaaggacaccttctacaaacagcctatgttctatcatctggggcactttagcaagttcattccagagggttccactagagtaggcttggttgcctcacagaagaatgatctggatgctgtggcactcctgcatcctgacgggagtgcagtggtggtagtactgaacaggtctagcaaagatgttcccttgactatcaaagacccagctgtgggctttctggaaaccatttcccctggatactctatccacacctatctctggagaagacag

SEQ ID NO: 1552 - protein, 536 aa, synthetic construct
  REGION 1..536: note = Variant of B-Glucocerebrosidase
MEFSSPSREECPKPLSRVSIMAGSLTGLLLLQAVSWASGARPCIPKSFGYSSVVCVCNATYCDSVDPLTLPALGTFSRYESTRSGRRMELSMGPIQANRTGTGLLLTLQPEQKFQKVKGFGGAMTDAAALNILALSPPAQNLLLKSYFSEEGIEYNIIRVPMASCDFSIRTYTYADTPDDFQLHNFSLPEEDTKWKIPLIHRALQLSQRPVSLFASPWTSPTWLKTNGAYNGKGSLKGQPGDIYHQTWARYFVKFLDAYAEHGLNFWAVTAENEPSAGLLSGYPFQCLGFTPEHQRDFIARDLGPTLANSTHHNVRLLILDDQRLLLPHWAKVVLTNPEAAKYVHGIAVHWYLDFLAPAKWTLGETHRLFPNTTLFASEACVGSKFWEQSVRLGSWDRGMQYSHSIIENLLYHVVGWTDWNLALNPEGGPNWVRNFVDSPIIVDITKDTFYKQPMFYHLGHFSKFIPEGSTRVGLVASQKNDLDAVALLHPDGSAVVVVLNRSSKDVPLTIKDPAVGFLETISPGYSIHTYLWRRQ

SEQ ID NO: 1553 - DNA, 1608 bp, synthetic construct
  misc_feature 1..1608: note = Variant of B-Glucocerebrosidase
  source 1..1608: mol_type = other DNA
atggagttttcttctcctagtagagaagaatgccccaagccactgagcagggtgagcatcatggctggatccctcacagggctgcttcttttgcaggcagtctcatgggcctctggagccaggccctgtattcccaagtcattcggctactcctcagtggtgtgtgtatgcaatgccacctattgtgacagtgtcgatcctctcactctccctgctctgggtaccttctcccggtatgagagcacaagaagtggaagacgcatggagctctcaatgggccctatacaggctaaccgcactgggacaggtctgctgctgaccctccaacctgaacagaagtttcagaaagtcaagggatttggaggagccatgactgatgcagcagcactcaacatcttggccctgtctccaccagcccagaacctgctgttgaagtcctacttctcagaggaggggattgagtacaacatcatccgggttcccatggctagctgtgacttctccattaggacctatacatacgctgacacccccgatgattttcagctccataatttcagtctccctgaagaagacaccaaatggaagatacctctgattcacagagccttgcaactgtcccaaaggccagtgagcctcttcgcttctccctggactagtcctacatggctgaagactaatggtgcttacaatgggaagggctccctgaaaggacagccaggtgacatatatcatcagacatgggcccgctactttgtgaaattccttgatgcctatgcagagcacgggctccaattctgggcagtcaccgcagaaaacgagccctcagctgggctgctgtctggctacccctttcagtgcttgggctttactcctgagcatcaacgggacttcattgcccgggatttggggccaacactggccaacagcacccaccacaatgtaagactcctcattctggatgaccagaggctgctgctccctcattgggccaaggtggtgttgacaaacccagaagctgccaaatatgttcatggcatcgctgtccactggtacctggattttttggcccctgccaagtggactctgggagagacccacagactcttccccaataccacactgtttgcatcagaagcctgcgtggggagcaaattctgggagcagtctgttaggctgggttcctgggatcggggcatgcaatattcccatagtataatagagaacctcctctaccacgtggtaggatggacagactggaatctggctttgaacccagaaggaggccccaattgggtgcgcaactttgttgacagccccatcattgtggatatcacaaaggacaccttctacaaacagcctatgttctatcatctggggcactttagcaagttcattccagagggttccactagagtaggcttggttgcctcacagaagaatgatctggatgctgtggcactcctgcatcctgacggggcagcagtggtggtagtactgaacaggtctagcaaagatgttcccttgactatcaaagacccagctgtgggctttctggaaaccatttcccctggatactctatccacacctatctctggagaagacag

SEQ ID NO: 1554 - protein, 536 aa, synthetic construct
  REGION 1..536: note = Variant of B-Glucocerebrosidase
MEFSSPSREECPKPLSRVSIMAGSLTGLLLLQAVSWASGARPCIPKSFGYSSVVCVCNATYCDSVDPLTLPALGTFSRYESTRSGRRMELSMGPIQANRTGTGLLLTLQPEQKFQKVKGFGGAMTDAAALNILALSPPAQNLLLKSYFSEEGIEYNIIRVPMASCDFSIRTYTYADTPDDFQLHNFSLPEEDTKWKIPLIHRALQLSQRPVSLFASPWTSPTWLKTNGAYNGKGSLKGQPGDIYHQTWARYFVKFLDAYAEHGLQFWAVTAENEPSAGLLSGYPFQCLGFTPEHQRDFIARDLGPTLANSTHHNVRLLILDDQRLLLPHWAKVVLTNPEAAKYVHGIAVHWYLDFLAPAKWTLGETHRLFPNTTLFASEACVGSKFWEQSVRLGSWDRGMQYSHSIIENLLYHVVGWTDWNLALNPEGGPNWVRNFVDSPIIVDITKDTFYKQPMFYHLGHFSKFIPEGSTRVGLVASQKNDLDAVALLHPDGAAVVVVLNRSSKDVPLTIKDPAVGFLETISPGYSIHTYLWRRQ

SEQ ID NO: 1555 - DNA, 1608 bp, synthetic construct
  misc_feature 1..1608: note = Variant of B-Glucocerebrosidase
  source 1..1608: mol_type = other DNA
atggagttttcttctcctagtagagaagaatgccccaagccactgagcagggtgagcatcatggctggatccctcacagggctgcttcttttgcaggcagtctcatgggcctctggagccaggccctgtattcccaagtcattcggctactcctcagtggtgtgtgtatgcaatgccacctattgtgacagtgtcgatcctctcactctccctgctctgggtaccttctcccggtatgagagcacaagaagtggaagacgcatggagctctcaatgggccctatacaggctaaccgcactgggacaggtctgctgctgaccctccaacctgaacagaagtttcagaaagtcaagggatttggaggagccatgactgatgcagcagcactcaacatcttggccctgtctccaccagcccagaacctgctgttgaagtcctacttctcagaggaggggattgagtacaacatcatccgggttcccatggctagctgtgacttctccattaggacctatacatacgctgacacccccgatgattttcagctccataatttcagtctccctgaagaagacaccaaatggaagatacctctgattcacagagccttgcaactgtcccaaaggccagtgagcctcttcgcttctccctggactagtcctacatggctgaagactaatggtgcttacaatgggaagggctccctgaaaggacagccaggtgacatatatcatcagacatgggcccgctactttgtgaaattccttgatgcctatgcagagcacgggctccaattctgggcagtcaccgcagaaaacgagccctcagctgggctgctgtctggctacccctttcagtgcttgggctttactcctgagcatcaacgggacttcattgcccgggatttggggccaacactggccaacagcacccaccacaatgtaagactcctcattctggatgaccagaggctgctgctccctcattgggccaaggtggtgttgacaaacccagaagctgccaaatatgttcatggcatcgctgtccactggtacctggattttttggcccctgccaagtggactctgggagagacccacagactcttccccaataccacactgtttgcatcagaagcctgcgtggggagcaaattctgggagcagtctgttaggctgggttcctgggatcggggcatgcaatattcccatagtataatagagaacctcctctaccacgtggtaggatggacagactggaatctggctttgaacccagaaggaggccccaattgggtgcgcaactttgttgacagccccatcattgtggatatcacaaaggacaccttctacaaacagcctatgttctatcatctggggcactttagcaagttcattccagagggttcccagagagtaggcttggttgcctcacagaagaatgatctggatgctgtggcactcatgcatcctgacgggagtgcagtggtggtagtactgaacaggtctagcaaagatgttcccttgactatcaaagacccagctgtgggctttctggaaaccatttcccctggatactctatccacacctatctctggagaagacag

SEQ ID NO: 1556 - protein, 536 aa, synthetic construct
  REGION 1..536: note = Variant of B-Glucocerebrosidase
MEFSSPSREECPKPLSRVSIMAGSLTGLLLLQAVSWASGARPCIPKSFGYSSVVCVCNATYCDSVDPLTLPALGTFSRYESTRSGRRMELSMGPIQANRTGTGLLLTLQPEQKFQKVKGFGGAMTDAAALNILALSPPAQNLLLKSYFSEEGIEYNIIRVPMASCDFSIRTYTYADTPDDFQLHNFSLPEEDTKWKIPLIHRALQLSQRPVSLFASPWTSPTWLKTNGAYNGKGSLKGQPGDIYHQTWARYFVKFLDAYAEHGLQFWAVTAENEPSAGLLSGYPFQCLGFTPEHQRDFIARDLGPTLANSTHHNVRLLILDDQRLLLPHWAKVVLTNPEAAKYVHGIAVHWYLDFLAPAKWTLGETHRLFPNTTLFASEACVGSKFWEQSVRLGSWDRGMQYSHSIIENLLYHVVGWTDWNLALNPEGGPNWVRNFVDSPIIVDITKDTFYKQPMFYHLGHFSKFIPEGSQRVGLVASQKNDLDAVALMHPDGSAVVVVLNRSSKDVPLTIKDPAVGFLETISPGYSIHTYLWRRQ

SEQ ID NO: 1557 - DNA, 1608 bp, synthetic construct
  misc_feature 1..1608: note = Variant of B-Glucocerebrosidase
  source 1..1608: mol_type = other DNA
atggagttttcttctcctagtagagaagaatgccccaagccactgagcagggtgagcatcatggctggatccctcacagggctgcttcttttgcaggcagtctcatgggcctctggagccaggccctgtattcccaagtcattcggctactcctcagtggtgtgtgtatgcaatgccacctattgtgacagtgtcgatcctctcactttccctgctctgggtaccttctcccggtatgagagcacaagaagtggaagacgcatggagctctcaatgggccctatacaggctaaccacactgggacaggtctgctgctgaccctccaacctgaacagaagtttcagaaagtcaagggatttggaggagccatgactgatgcagcagcactcaacatcttggccctgtctccaccagcccagaacctgctgttgaagtcctacttctcagaggaggggattgagtacaacatcatccgggttcccatggctagctgtgacttctccattaggacctatacatacgctgacacccccgatgattttcagctccataatttcagtctccctgaagaagacaccaaatggaagatacctctgattcacagagccttgcaactggcacaaaggccagtgagcctcttcgcttctccctggactagtcctacatggctgaagactaatggtgcttacaatgggaagggctccctgaaaggacagccaggtgacatatatcatcagacatgggcccgctactttgtgaaattccttgatgcctatgcagagcacaagctccaattctgggcagtcaccgcagaaaacgagccctcagctgggctgctgtctggctacccctttcagtgcttgggctttactcctgagcatcaacgggacttcattgcccgggatttggggccaacactggccaacagcacccaccacaatgtaagactcctcattctggatgaccagaggctgctgctccctcattgggccaaggtggtgttgacaaacccagaagctgccaaatatgttcatggcatcgctgtccactggtacctggattttttggcccctgccaaggctactctgggagagacccacagactcttccccaataccacactgtttgcatcagaagcctgcgtggggagcaaattctgggagcagtctgttaggctgggttcctgggatcggggcatgcaatattcccatagtataatagagaacctcctctaccacgtggtaggatggacagactggaatctggctttgaacccagaaggaggccccaattgggtgcgcaactttgttgacagccccatcattgtggatatcacaaaggacaccttctacaaacagcctatgttctatcatctggggcactttagcaagttcattccagagggttcccagagagtaggcttggttgcctcacagaagaatgatctggatgctgtggcactcatgcatcctgacgggagtgcagtggtggtagtactgaacaggtctagcaaagatgttcccttgactatcaaagacccagctgtgggctttctggaaaccatttcccctggatactctatccacacctatctctggagaagacag

SEQ ID NO: 1558 - protein, 536 aa, synthetic construct
  REGION 1..536: note = Variant of B-Glucocerebrosidase
MEFSSPSREECPKPLSRVSIMAGSLTGLLLLQAVSWASGARPCIPKSFGYSSVVCVCNATYCDSVDPLTFPALGTFSRYESTRSGRRMELSMGPIQANHTGTGLLLTLQPEQKFQKVKGFGGAMTDAAALNILALSPPAQNLLLKSYFSEEGIEYNIIRVPMASCDFSIRTYTYADTPDDFQLHNFSLPEEDTKWKIPLIHRALQLAQRPVSLFASPWTSPTWLKTNGAYNGKGSLKGQPGDIYHQTWARYFVKFLDAYAEHKLQFWAVTAENEPSAGLLSGYPFQCLGFTPEHQRDFIARDLGPTLANSTHHNVRLLILDDQRLLLPHWAKVVLTNPEAAKYVHGIAVHWYLDFLAPAKATLGETHRLFPNTTLFASEACVGSKFWEQSVRLGSWDRGMQYSHSIIENLLYHVVGWTDWNLALNPEGGPNWVRNFVDSPIIVDITKDTFYKQPMFYHLGHFSKFIPEGSQRVGLVASQKNDLDAVALMHPDGSAVVVVLNRSSKDVPLTIKDPAVGFLETISPGYSIHTYLWRRQ

SEQ ID NO: 1559 - DNA, 1608 bp, synthetic construct
  misc_feature 1..1608: note = Variant of B-Glucocerebrosidase
  source 1..1608: mol_type = other DNA
atggagttttcttctcctagtagagaagaatgccccaagccactgagcagggtgagcatcatggctggatccctcacagggctgcttcttttgcaggcagtctcatgggcctctggagccaggccctgtattcccaagtcattcggctactcctcagtggtgtgtgtatgcaatgccacctattgtgacagtgtcgatcctctcactctccctgctctgggtaccttctcccggtatgagagcacaagaagtggaagacgcatggagctctcaatgggccctatacaggctaaccgcactgggacaggtctgctgctgaccctccaacctgaacagaagtttcagaaagtcaagggatttggaggagccatgactgatgcagcagcactcaacatcttggccctgtctccaccagcccagaacctgctgttgaagtcctacttctcagaggaggggattgagtacaacatcatccgggttcccatggctagctgtgacttctccattaggacctatacatacgctgacacccccgatgattttcagctccataatttcagtctccctgaagaagacaccaaatggaagatacctctgattcacagagccttgcaactgtcccaaaggccagtgagcctcttcgcttctccctggactagtcctacatggctgaagactaatggtgcttacaatgggaagggctccctgaaaggacagccaggtgacatatatcatcagacatgggcccgctactttgtgaaattccttgatgcctatgcagagcacgggctccaattctgggcagtcaccgcagaaaacgagccctcagctgggctgctgtctggctacccctttcagtgcttgggctttactcctgagcatcaacgggacttcattgcccgggatttggggccaacactggccaacagcacccaccacaatgtaagactcctcatgctggatgaccagaggctgctgctccctcattgggccaaggtggtgttgacagacccagaagctgccaaatatgttcatggcatcgctgtccactggtacctggattttttggcccctgccaaggctactctgggagagacccacagactcttccccaataccacactgtttgcatcagaagcctgcgtggggagcaaattctgggagcagtctgttaggctgggttcctgggatcggggcatgcaatattcccatagtataatagagaacctcctctaccacgtggtaggatggacagactggaatctggctttgaacccagaaggaggccccaattgggtgcgcaactttgttgacagccccatcattgtggatatcacaaaggacaccttctacaaacagcctatgttctatcatctggggcactttagcaagttcattccagagggttcccagagagtaggcttggttgcctcacagaagaatgatctggatgctgtggcactcatgcatcctgacgggagtgcagtggtggtagtactgaacaggtctagcaaagatgttcccttgactatcaaagacccagctgtgggctttctggaaaccatttcccctggatactctatccacacctatctctggagaagacag

SEQ ID NO: 1560 - protein, 536 aa, synthetic construct
  REGION 1..536: note = Variant of B-Glucocerebrosidase
MEFSSPSREECPKPLSRVSIMAGSLTGLLLLQAVSWASGARPCIPKSFGYSSVVCVCNATYCDSVDPLTLPALGTFSRYESTRSGRRMELSMGPIQANRTGTGLLLTLQPEQKFQKVKGFGGAMTDAAALNILALSPPAQNLLLKSYFSEEGIEYNIIRVPMASCDFSIRTYTYADTPDDFQLHNFSLPEEDTKWKIPLIHRALQLSQRPVSLFASPWTSPTWLKTNGAYNGKGSLKGQPGDIYHQTWARYFVKFLDAYAEHGLQFWAVTAENEPSAGLLSGYPFQCLGFTPEHQRDFIARDLGPTLANSTHHNVRLLMLDDQRLLLPHWAKVVLTDPEAAKYVHGIAVHWYLDFLAPAKATLGETHRLFPNTTLFASEACVGSKFWEQSVRLGSWDRGMQYSHSIIENLLYHVVGWTDWNLALNPEGGPNWVRNFVDSPIIVDITKDTFYKQPMFYHLGHFSKFIPEGSQRVGLVASQKNDLDAVALMHPDGSAVVVVLNRSSKDVPLTIKDPAVGFLETISPGYSIHTYLWRRQ

SEQ ID NO: 1561 - DNA, 1608 bp, synthetic construct
  misc_feature 1..1608: note = Variant of B-Glucocerebrosidase
  source 1..1608: mol_type = other DNA
atggagttttcttctcctagtagagaagaatgccccaagccactgagcagggtgagcatcatggctggatccctcacagggctgcttcttttgcaggcagtctcatgggcctctggagccaggccctgtattcccaagtcattcggctactcctcagtggtgtgtgtatgcaatgccacctattgtgacagtgtcgatcctctcactctccctgctctgggtaccttctcccggtatgagagcacaagaagtggaagacgcatggagctctcaatgggccctatacaggctaaccacactgggacaggtctgctgctgaccctccaacctgaacagaagtttcagaaagtcaagggatttggaggagccatgactgatgcagcagcactcaacatcttggccctgtctccaccagcccagaacctgctgttgaagtcctacttctcagaggaggggattgagtacaacatcatccgggttcccatggctagctgtgacttctccattaggacctatacatacgctgacacccccgatgattttcagctccataatttcagtctccctgaagaagacaccaaatggaagatacctctgattcacagagccttgcaactggcacaaaggccagtgagcctcttcgcttctccctggactagtcctacatggctgaagactaatggtgcttacaatgggaagggctccctgaaaggacagccaggtgacatatatcatcagacatgggcccgctactttgtgaaattccttgatgcctatgcagagcacaagctccaattctgggcagtcaccgcagaaaacgagccctcagctgggctgctgtctggctacccctttcagtgcttgggctttactcctgagcatcaacgggacttcattgcccgggatttggggccaacactggccaacagcacccaccacaatgtaagactcctcattctggatgaccagaggctgctgctccctcattgggccaaggtggtgttgacagacccagaagctgccaaatatgttcatggcatcgctgtccactggtacctggattttttggcccctgccaaggctactctgggagagacccacagactcttccccaataccacactgtttgcatcagaagcctgcgtggggagcaaattctgggagcagtctgttaggctgggttcctgggatcggggcatgcaatattcccatagtataatagagaacctcctctaccacgtggtaggatggacagactggaatctggctttgaacccagaaggaggccccaattgggtgcgcaactttgttgacagccccatcattgtggatatcacaaaggacaccttctacaaacagcctatgttctatcatctggggcactttagcaagttcattccagagggttcccagagagtaggcttggttgcctcacagaagaatgatctggatgctgtggcactcctgcatcctgacgggagtgcagtggtggtagtactgaacaggtctagcaaagatgttcccttgactatcaaagacccagctgtgggctttctggaaaccatttcccctggatactctatccacacctatctctggagaagacag

SEQ ID NO: 1562 - protein, 536 aa, synthetic construct
  REGION 1..536: note = Variant of B-Glucocerebrosidase
MEFSSPSREECPKPLSRVSIMAGSLTGLLLLQAVSWASGARPCIPKSFGYSSVVCVCNATYCDSVDPLTLPALGTFSRYESTRSGRRMELSMGPIQANHTGTGLLLTLQPEQKFQKVKGFGGAMTDAAALNILALSPPAQNLLLKSYFSEEGIEYNIIRVPMASCDFSIRTYTYADTPDDFQLHNFSLPEEDTKWKIPLIHRALQLAQRPVSLFASPWTSPTWLKTNGAYNGKGSLKGQPGDIYHQTWARYFVKFLDAYAEHKLQFWAVTAENEPSAGLLSGYPFQCLGFTPEHQRDFIARDLGPTLANSTHHNVRLLILDDQRLLLPHWAKVVLTDPEAAKYVHGIAVHWYLDFLAPAKATLGETHRLFPNTTLFASEACVGSKFWEQSVRLGSWDRGMQYSHSIIENLLYHVVGWTDWNLALNPEGGPNWVRNFVDSPIIVDITKDTFYKQPMFYHLGHFSKFIPEGSQRVGLVASQKNDLDAVALLHPDGSAVVVVLNRSSKDVPLTIKDPAVGFLETISPGYSIHTYLWRRQ

SEQ ID NO: 1563 - DNA, 1608 bp, synthetic construct
  misc_feature 1..1608: note = Variant of B-Glucocerebrosidase
  source 1..1608: mol_type = other DNA
atggagttttcttctcctagtagagaagaatgccccaagccactgagcagggtgagcatcatggctggatccctcacagggctgcttcttttgcaggcagtctcatgggcctctggagccaggccctgtattcccaagtcattcggctactcctcagtggtgtgtgtatgcaatgccacctattgtgacagtgtcgatcctctcactctccctgctctgggtaccttctcccggtatgagagcacaagaagtggaagacgcatggagctctcaatgggccctatacaggctaaccgcactgggacaggtctgctgctgaccctccaacctgaacagaagtttcagaaagtcaagggatttggaggagccatgactgatgcagcagcactcaacatcttggccctgtctccaccagcccagaacctgctgttgaagtcctacttctcagaggaggggattgagtacaacatcatccgggttcccatggctagctgtgacttctccattaggacctatacatacgctgacacccccgatgattttcagctccataatttcagtctccctgaagaagacaccaaatggaagatacctctgattcacagagccttgcaactgtcccaaaggccagtgagcctcttcgcttctccctggactagtcctacatggctgaagactaatggtgcttacaatgggaagggctccctgaaaggacagccaggtgacatatatcatcagacatgggcccgctactttgtgaaattccttgatgcctatgcagagcacaagctccaattctgggcagtcaccgcagaaaacgagccctcagctgggctgctgtctggctacccctttcagtgcttgggctttactcctgagcatcaacgggacttcattgcccgggatttggggccaacactggccaacagcacccaccacaatgtaagactcctcattctggatgaccagaggctgctgctccctcattgggccaaggtggtgttgacaaacccagaagctgccaaatatgttcatggcatcgctgtccactggtacctggattttttggcccctgccaagtggactctgggagagacccacagactcttccccaataccacactgtttgcatcagaagcctgcgtggggagcaaattctgggagcagtctgttaggctgggttcctgggatcggggcatgcaatattcccatagtataatagagaacctcctctaccacgtggtaggatggacagactggaatctggctttgaacccagaaggaggccccaattgggtgcgcaactttgttgacagccccatcattgtggatatcacaaaggacaccttctacaaacagcctatgttctatcatctggggcactttagcaagttcattccagagggttccactagagtaggcttggttgcctcacagaagaatgatctggatgctgtggcactcctgcatcctgacgggagtgcagtggtggtagtactgaacaggtctagcaaagatgttcccttgactatcaaagacccagctgtgggctttctggaaaccatttcccctggatactctatccacacctatctctggagaagacag

SEQ ID NO: 1564 - protein, 536 aa, synthetic construct
  REGION 1..536: note = Variant of B-Glucocerebrosidase
MEFSSPSREECPKPLSRVSIMAGSLTGLLLLQAVSWASGARPCIPKSFGYSSVVCVCNATYCDSVDPLTLPALGTFSRYESTRSGRRMELSMGPIQANRTGTGLLLTLQPEQKFQKVKGFGGAMTDAAALNILALSPPAQNLLLKSYFSEEGIEYNIIRVPMASCDFSIRTYTYADTPDDFQLHNFSLPEEDTKWKIPLIHRALQLSQRPVSLFASPWTSPTWLKTNGAYNGKGSLKGQPGDIYHQTWARYFVKFLDAYAEHKLQFWAVTAENEPSAGLLSGYPFQCLGFTPEHQRDFIARDLGPTLANSTHHNVRLLILDDQRLLLPHWAKVVLTNPEAAKYVHGIAVHWYLDFLAPAKWTLGETHRLFPNTTLFASEACVGSKFWEQSVRLGSWDRGMQYSHSIIENLLYHVVGWTDWNLALNPEGGPNWVRNFVDSPIIVDITKDTFYKQPMFYHLGHFSKFIPEGSTRVGLVASQKNDLDAVALLHPDGSAVVVVLNRSSKDVPLTIKDPAVGFLETISPGYSIHTYLWRRQ

SEQ ID NO: 1565 - DNA, 1608 bp, synthetic construct
  misc_feature 1..1608: note = Variant of B-Glucocerebrosidase
  source 1..1608: mol_type = other DNA
atggagttttcttctcctagtagagaagaatgccccaagccactgagcagggtgagcatcatggctggatccctcacagggctgcttcttttgcaggcagtctcatgggcctctggagccaggccctgtattcccaagtcattcggctactcctcagtggtgtgtgtatgcaatgccacctattgtgacagtgtcgatcctctcactctccctgctctgggtaccttctcccggtatgagagcacaagaagtggaagacgcatggagctctcaatgggccctatacaggctaaccgcactgggacaggtctgctgctgaccctccaacctgaacagaagtttcagaaagtcaagggatttggaggagccatgactgatgcagcagcactcaacatcttggccctgtctccaccagcccagaacctgctgttgaagtcctacttctcagaggaggggattgagtacaacatcatccgggttcccatggctagctgtgacttctccattaggacctatacatacgctgacacccccgatgattttcagctccataatttcagtctccctgaagaagacaccaaatggaagatacctctgattcacagagccttgcaactgtcccaaaggccagtgagcctcttcgcttctccctggactagtcctacatggctgaagactaatggtgcttacaatgggaagggctccctgaaaggacagccaggtgacatatatcatcagacatgggcccgctactttgtgaaattccttgatgcctatgcagagcacgggctccaattctgggcagtcaccgcagaaaacgagccctcagctgggctgctgtctggctacccctttcagtgcttgggctttactcctgagcatcaacgggacttcattgcccgggatttggggccaacactggccaacagcacccaccacaatgtaagactcctcattctggatgaccagaggctgctgctccctcattgggccaaggtggtgttgacaaacccagaagctgccaaatatgttcatggcatcgctgtccactggtacctggattttttggcccctgccaaggctactctgggagagacccacagactcttccccaataccacactgtttgcatcagaagcctgcgtggggagcaaattctgggagcagtctgttaggctgggttcctgggatcggggcatgcaatattcccatagtataatagagaacctcctctaccacgtggtaggatggacagactggaatctggctttgaacccagaaggaggccccaattgggtgcgcaactttgttgacagccccatcattgtggatatcacaaaggacaccttctacaaacagcctatgttctatcatctggggcactttagcaagttcattccagagggttcccagagagtaggcttggttgcctcacagaagaatgatctggatgctgtggcactcatgcatcctgacgggagtgcagtggtggtagtactgaacaggtctagcaaagatgttcccttgactatcaaagacccagctgtgggctttctggaaaccatttcccctggatactctatccacacctatctctggagaagacag

SEQ ID NO: 1566 - protein, 536 aa, synthetic construct
  REGION 1..536: note = Variant of B-Glucocerebrosidase
MEFSSPSREECPKPLSRVSIMAGSLTGLLLLQAVSWASGARPCIPKSFGYSSVVCVCNATYCDSVDPLTLPALGTFSRYESTRSGRRMELSMGPIQANRTGTGLLLTLQPEQKFQKVKGFGGAMTDAAALNILALSPPAQNLLLKSYFSEEGIEYNIIRVPMASCDFSIRTYTYADTPDDFQLHNFSLPEEDTKWKIPLIHRALQLSQRPVSLFASPWTSPTWLKTNGAYNGKGSLKGQPGDIYHQTWARYFVKFLDAYAEHGLQFWAVTAENEPSAGLLSGYPFQCLGFTPEHQRDFIARDLGPTLANSTHHNVRLLILDDQRLLLPHWAKVVLTNPEAAKYVHGIAVHWYLDFLAPAKATLGETHRLFPNTTLFASEACVGSKFWEQSVRLGSWDRGMQYSHSIIENLLYHVVGWTDWNLALNPEGGPNWVRNFVDSPIIVDITKDTFYKQPMFYHLGHFSKFIPEGSQRVGLVASQKNDLDAVALMHPDGSAVVVVLNRSSKDVPLTIKDPAVGFLETISPGYSIHTYLWRRQ

SEQ ID NO: 1567 - DNA, 1608 bp, synthetic construct
  misc_feature 1..1608: note = Variant of B-Glucocerebrosidase
  source 1..1608: mol_type = other DNA
atggagttttcttctcctagtagagaagaatgccccaagccactgagcagggtgagcatcatggctggatccctcacagggctgcttcttttgcaggcagtctcatgggcctctggagccaggccctgtattcccaagtcattcggctactcctcagtggtgtgtgtatgcaatgccacctattgtgacagtgtcgatcctctcactttccctgctctgggtaccttctcccggtatgagagcacaagaagtggaagacgcatggagctctcaatgggccctatacaggctaaccacactgggacaggtctgctgctgaccctccaacctgaacagaagtttcagaaagtcaagggatttggaggagccatgactgatgcagcagcactcaacatcttggccctgtctccaccagcccagaacctgctgttgaagtcctacttctcagaggaggggattgagtacaacatcatccgggttcccatggctagctgtgacttctccattaggacctatacatacgctgacacccccgatgattttcagctccataatttcagtctccctgaagaagacaccaaatggaagatacctctgattcacagagccttgcaactgtcccaaaggccagtgagcctcttcgcttctccctggactagtcctacatggctgaagactaatggtgcttacaatgggaagggctccctgaaaggacagccaggtgacatatatcatcagacatgggcccgctactttgtgaaattccttgatgcctatgcagagcacgggctccaattctgggcagtcaccgcagaaaacgagccctcagctgggctgctgtctggctacccctttcagtgcttgggctttactcctgagcatcaacgggacttcattgcccgggatttggggccaacactggccaacagcacccaccacaatgtaagactcctcattctggatgaccagaggctgctgctccctcattgggccaaggtggtgttgacaaacccagaagctgccaaatatgttcatggcatcgctgtccactggtacctggattttttggcccctgccaagtggactctgggagagacccacagactcttccccaataccacactgtttgcatcagaagcctgcgtggggagcaaattctgggagcagtctgttaggctgggttcctgggatcggggcatgcaatattcccatagtataatagagaacctcctctaccacgtggtaggatggacagactggaatctggctttgaacccagaaggaggccccaattgggtgcgcaactttgttgacagccccatcattgtggatatcacaaaggacaccttctacaaacagcctatgttctatcatctggggcactttagcaagttcattccagagggttccactagagtaggcttggttgcctcacagaagaatgatctggatgctgtggcactcctgcatcctgacgggagtgcagtggtggtagtactgaacaggtctagcaaagatgttcccttgactatcaaagacccagctgtgggctttctggaaaccatttcccctggatactctatccacacctatctctggagaagacag

SEQ ID NO: 1568 - protein, 536 aa, synthetic construct
  REGION 1..536: note = Variant of B-Glucocerebrosidase
MEFSSPSREECPKPLSRVSIMAGSLTGLLLLQAVSWASGARPCIPKSFGYSSVVCVCNATYCDSVDPLTFPALGTFSRYESTRSGRRMELSMGPIQANHTGTGLLLTLQPEQKFQKVKGFGGAMTDAAALNILALSPPAQNLLLKSYFSEEGIEYNIIRVPMASCDFSIRTYTYADTPDDFQLHNFSLPEEDTKWKIPLIHRALQLSQRPVSLFASPWTSPTWLKTNGAYNGKGSLKGQPGDIYHQTWARYFVKFLDAYAEHGLQFWAVTAENEPSAGLLSGYPFQCLGFTPEHQRDFIARDLGPTLANSTHHNVRLLILDDQRLLLPHWAKVVLTNPEAAKYVHGIAVHWYLDFLAPAKWTLGETHRLFPNTTLFASEACVGSKFWEQSVRLGSWDRGMQYSHSIIENLLYHVVGWTDWNLALNPEGGPNWVRNFVDSPIIVDITKDTFYKQPMFYHLGHFSKFIPEGSTRVGLVASQKNDLDAVALLHPDGSAVVVVLNRSSKDVPLTIKDPAVGFLETISPGYSIHTYLWRRQ

SEQ ID NO: 1569 - DNA, 1608 bp, synthetic construct
  misc_feature 1..1608: note = Variant of B-Glucocerebrosidase
  source 1..1608: mol_type = other DNA
atggagttttcttctcctagtagagaagaatgccccaagccactgagcagggtgagcatcatggctggatccctcacagggctgcttcttttgcaggcagtctcatgggcctctggagccaggccctgtattcccaagtcattcggctactcctcagtggtgtgtgtatgcaatgccacctattgtgacagtgtcgatcctctcactctccctgctctgggtaccttctcccggtatgagagcacaagaagtggaagacgcatggagctctcaatgggccctatacaggctaaccgcactgggacaggtctgctgctgaccctccaacctgaacagaagtttcagaaagtcaagggatttggaggagccatgactgatgcagcagcactcaacatcttggccctgtctccaccagcccagaacctgctgttgaagtcctacttctcagaggaggggattgagtacaacatcatccgggttcccatggctagctgtgacttctccattaggacctatacatacgctgacacccccgatgattttcagctccataatttcagtctccctgaagaagacaccaaatggaagatacctctgattcacagagccttgcaactgtcccaaaggccagtgagcctcttcgcttctccctggactagtcctacatggctgaagactaatggtgcttacaatgggaagggctccctgaaaggacagccaggtgacatatatcatcagacatgggcccgctactttgtgaaattccttgatgcctatgcagagcacgggctccaattctgggcagtcaccgcagaaaacgagccctcagctgggctgctgtctggctacccctttcagtgcttgggctttactcctgagcatcaacgggacttcattgcccgggatttggggccaacactggccaacagcacccaccacaatgtaagactcctcattctggatgaccagaggctgctgctccctcattgggccaaggtggtgttgacaaacccagaagctgccaaatatgttcatggcatcgctgtccactggtacctggattttttggcccctgccaagtggactctgggagagacccacagactcttccccaataccacactgtttgcatcagaagcctgcgtggggagcaaattctgggagcagtctgttaggctgggttcctgggatcggggcatgcaatattcccatagtataatagagaacctcctctaccacgtggtaggatggacagactggaatctggctttgaacccagaaggaggccccaattgggtgcgcaactttgttgacagccccatcattgtggatatcacaaaggacaccttctacaaacagcctatgttctatcatctggggcactttagcaagttcattccagagggttcccagagagtaggcttggttgcctcacagaagaatgatctggatgctgtggcactcctgcatcctgacgggagtgcagtggtggtagtactgaacaggtctagcaaagatgttcccttgactatcaaagacccagctgtgggctttctggaaaccatttcccctggatactctatccacacctatctctggagaagacag

SEQ ID NO: 1570 - protein, 536 aa, synthetic construct
  REGION 1..536: note = Variant of B-Glucocerebrosidase
MEFSSPSREECPKPLSRVSIMAGSLTGLLLLQAVSWASGARPCIPKSFGYSSVVCVCNATYCDSVDPLTLPALGTFSRYESTRSGRRMELSMGPIQANRTGTGLLLTLQPEQKFQKVKGFGGAMTDAAALNILALSPPAQNLLLKSYFSEEGIEYNIIRVPMASCDFSIRTYTYADTPDDFQLHNFSLPEEDTKWKIPLIHRALQLSQRPVSLFASPWTSPTWLKTNGAYNGKGSLKGQPGDIYHQTWARYFVKFLDAYAEHGLQFWAVTAENEPSAGLLSGYPFQCLGFTPEHQRDFIARDLGPTLANSTHHNVRLLILDDQRLLLPHWAKVVLTNPEAAKYVHGIAVHWYLDFLAPAKWTLGETHRLFPNTTLFASEACVGSKFWEQSVRLGSWDRGMQYSHSIIENLLYHVVGWTDWNLALNPEGGPNWVRNFVDSPIIVDITKDTFYKQPMFYHLGHFSKFIPEGSQRVGLVASQKNDLDAVALLHPDGSAVVVVLNRSSKDVPLTIKDPAVGFLETISPGYSIHTYLWRRQ

SEQ ID NO: 1571 - DNA, 1608 bp, synthetic construct
  misc_feature 1..1608: note = Variant of B-Glucocerebrosidase
  source 1..1608: mol_type = other DNA
atggagttttcttctcctagtagagaagaatgccccaagccactgagcagggtgagcatcatggctggatccctcacagggctgcttcttttgcaggcagtctcatgggcctctggagccaggccctgtattcccaagtcattcggctactcctcagtggtgtgtgtatgcaatgccacctattgtgacagtgtcgatcctctcactctccctgctctgggtaccttctcccggtatgagagcacaagaagtggaagacgcatggagctctcaatgggccctatacaggctaaccgcactgggacaggtctgctgctgaccctccaacctgaacagaagtttcagaaagtcaagggatttggaggagccatgactgatgcagcagcactcaacatcttggccctgtctccaccagcccagaacctgctgttgaagtcctacttctcagaggaggggattgagtacaacatcatccgggttcccatggctagctgtgacttctccattaggacctatacatacgctgacacccccgatgattttcagctccataatttcagtctccctgaagaagacaccaaatggaagatacctctgattcacagagccttgcaactgtcccaaaggccagtgagcctcttcgcttctccctggactagtcctacatggctgaagactaatggtgcttacaatgggaagggctccctgaaaggacagccaggtgacatatatcatcagacatgggcccgctactttgtgaaattccttgatgcctatgcagagcacaagctccaattctgggcagtcaccgcagaaaacgagccctcagctgggctgctgtctggctacccctttcagtgcttgggctttactcctgagcatcaacgggacttcattgcccgggatttggggccaacactggccaacagcacccaccacaatgtaagactcctcatgctggatgaccagaggctgctgctccctcattgggccaaggtggtgttgacagacccagaagctgccaaatatgttcatggcatcgctgtccactggtacctggattttttggcccctgccaaggctactctgggagagacccacagactcttccccaataccacactgtttgcatcagaagcctgcgtggggagcaaattctgggagcagtctgttaggctgggttcctgggatcggggcatgcaatattcccatagtataatagagaacctcctctaccacgtggtaggatggacagactggaatctggctttgaacccagaaggaggccccaattgggtgcgcaactttgttgacagccccatcattgtggatatcacaaaggacaccttctacaaacagcctatgttctatcatctggggcactttagcaagttcattccagagggttccactagagtaggcttggttgcctcacagaagaatgatctggatgctgtggcactcatgcatcctgacgggagtgcagtggtggtagtactgaacaggtctagcaaagatgttcccttgactatcaaagacccagctgtgggctttctggaaaccatttcccctggatactctatccacacctatctctggagaagacag

SEQ ID NO: 1572 - protein, 536 aa, synthetic construct
  REGION 1..536: note = Variant of B-Glucocerebrosidase
MEFSSPSREECPKPLSRVSIMAGSLTGLLLLQAVSWASGARPCIPKSFGYSSVVCVCNATYCDSVDPLTLPALGTFSRYESTRSGRRMELSMGPIQANRTGTGLLLTLQPEQKFQKVKGFGGAMTDAAALNILALSPPAQNLLLKSYFSEEGIEYNIIRVPMASCDFSIRTYTYADTPDDFQLHNFSLPEEDTKWKIPLIHRALQLSQRPVSLFASPWTSPTWLKTNGAYNGKGSLKGQPGDIYHQTWARYFVKFLDAYAEHKLQFWAVTAENEPSAGLLSGYPFQCLGFTPEHQRDFIARDLGPTLANSTHHNVRLLMLDDQRLLLPHWAKVVLTDPEAAKYVHGIAVHWYLDFLAPAKATLGETHRLFPNTTLFASEACVGSKFWEQSVRLGSWDRGMQYSHSIIENLLYHVVGWTDWNLALNPEGGPNWVRNFVDSPIIVDITKDTFYKQPMFYHLGHFSKFIPEGSTRVGLVASQKNDLDAVALMHPDGSAVVVVLNRSSKDVPLTIKDPAVGFLETISPGYSIHTYLWRRQ

SEQ ID NO: 1573 - DNA, 1608 bp, synthetic construct
  misc_feature 1..1608: note = Variant of B-Glucocerebrosidase
  source 1..1608: mol_type = other DNA
atggagttttcttctcctagtagagaagaatgccccaagccactgagcagggtgagcatcatggctggatccctcacagggctgcttcttttgcaggcagtctcatgggcctctggagccaggccctgtattcccaagtcattcggctactcctcagtggtgtgtgtatgcaatgccacctattgtgacagttttgatcctctcactctccctgctctgggtaccttctcccggtatgagagcacaagaagtggaagacgcatggagctctcaatgggccctatacaggctaaccgcactgggacaggtctgctgctgaccctccaacctgaacagaagtttcagaaagtcaagggatttggaggagccatgactgatgcagcagcactcaacatcttggccctgtctccaccagcccagaacctgctgttgaagtcctacttctcagaggaggggattgagtacaacatcatccgggttcccatggctagctgtgacttctccattaggacctatacatacgctgacacccccgatgattttcagctccataatttcagtctccctgaagaagacaccaaatggaagatacctctgattcacagagccttgcaactgtcccaaaggccagtgagcctcttcgcttctccctggactagtcctacatggctgaagactaatggtgcttacaatgggaagggctccctgaaaggacagccaggtgacatatatcatcagacatgggcccgctactttgtgaaattccttgatgcctatgcagagcacgggctccaattctgggcagtcaccgcagaaaacgagccctcagctgggctgctgtctggctacccctttcagtgcttgggctttactcctgagcatcaacgggacttcattgcccgggatttggggccaacactggccaacagcacccaccacaatgtaagactcctcattctggatgaccagaggctgctgctccctcattgggccaaggtggtgttgacagacccagaagctgccaaatatgttcatggcatcgctgtccactggtacctggattttttggcccctgccaaggctactctgggagagacccacagactcttccccaataccatgctgtttgcatcagaagcctgcgtggggagcaaattctgggagcagtctgttaggctgggttcctgggatcggggcatgcaatattcccatagtataatagagaacctcctctaccacgtggtaggatggacagactggaatctggctttgaacccagaaggaggccccaattgggtgcgcaactttgttgacagccccatcattgtggatatcacaaaggacaccttctacaaacagcctatgttctatcatctggggcactttagcaagttcattccagagggttcccagagagtaggcttggttgcctcacagaagaatgatctggatgctgtggcactcatgcatcctgacgggagtgcagtggtggtagtactgaacaggtctagcaaagatgttcccttgactatcaaagacccagctgtgggctttctggaaaccatttcccctggatactctatccacacctatctctggagaagacag

SEQ ID NO: 1574 - protein, 536 aa, synthetic construct
  REGION 1..536: note = Variant of B-Glucocerebrosidase
MEFSSPSREECPKPLSRVSIMAGSLTGLLLLQAVSWASGARPCIPKSFGYSSVVCVCNATYCDSFDPLTLPALGTFSRYESTRSGRRMELSMGPIQANRTGTGLLLTLQPEQKFQKVKGFGGAMTDAAALNILALSPPAQNLLLKSYFSEEGIEYNIIRVPMASCDFSIRTYTYADTPDDFQLHNFSLPEEDTKWKIPLIHRALQLSQRPVSLFASPWTSPTWLKTNGAYNGKGSLKGQPGDIYHQTWARYFVKFLDAYAEHGLQFWAVTAENEPSAGLLSGYPFQCLGFTPEHQRDFIARDLGPTLANSTHHNVRLLILDDQRLLLPHWAKVVLTDPEAAKYVHGIAVHWYLDFLAPAKATLGETHRLFPNTMLFASEACVGSKFWEQSVRLGSWDRGMQYSHSIIENLLYHVVGWTDWNLALNPEGGPNWVRNFVDSPIIVDITKDTFYKQPMFYHLGHFSKFIPEGSQRVGLVASQKNDLDAVALMHPDGSAVVVVLNRSSKDVPLTIKDPAVGFLETISPGYSIHTYLWRRQ

SEQ ID NO: 1575 - DNA, 1608 bp, synthetic construct
  misc_feature 1..1608: note = Variant of B-Glucocerebrosidase
  source 1..1608: mol_type = other DNA
atggagttttcttctcctagtagagaagaatgccccaagccactgagcagggtgagcatcatggctggatccctcacagggctgcttcttttgcaggcagtctcatgggcctctggagccaggccctgtattcccaagtcattcggctactcctcagtggtgtgtgtatgcaatgccacctattgtgacagtgtcgatcctctcactctccctgctctgggtaccttctcccggtatgagagcacaagaagtggaagacgcatggagctctcaatgggccctatacaggctaaccacactgggacaggtctgctgctgaccctccaacctgaacagaagtttcagaaagtcaagggatttggaggagccatgactgatgcagcagcactcaacatcttggccctgtctccaccagcccagaacctgctgttgaagtcctacttctcagaggaggggattggctacaacatcatccgggttcccatggctagctgtgacttctccattaggacctatacatacgctgacacccccgatgattttcagctccataatttcagtctccctgaagaagacaccaaactgaagatacctctgattcacagagccttgcaactgtcccaaaggccagtgagcctcttggcttctccctggactagtcctacatggctgaagactaatggtgcttacaatgggaagggctccctgaaaggacagccaggtgacatatatcatcagacatgggcccgctactttgtgaaattccttgatgcctatgcagagcacaagctccaattctgggcagtcaccgcagaaaacgagccctcagctgggctgctgtctggctacccctttcagtgcttgggctttactcctgagcatcaacgggacttcattgcccgggatttggggccaacactggccaacagcacccaccacaatgtaagactcctcatgctggatgaccagaggctgctgctccctcattgggccaaggtggtgttgacagacccagaagctgccaaatatgttcatggcatcgctgtccactggtacctggattttttggcccctgccaaggctactctgggagagacccacagactcttccccaataccacactgtttgcatcagaagcctgcgtggggagcaaattctgggagcagtctgttaggctgggttcctgggatcggggcatgcaatattcccatagtataatagagaacctcctctaccacgtggtaggatggacagactggaatctggctttgaacccagaaggaggccccaattgggtgcgcaactttgttgacagccccatcattgtggatatcacaaaggacaccttctacaaacagcctatgttctatcatctggggcactttagcaagttcattccagagggttcccagagagtaggcttggttgcctcacagaagaatgatctggatgctgtggcactcatgcatcctgacgggagtgcagtggtggtagtactgaacaggtctagcaaagatgttcccttgactatcaaagacccagctgtgggctttctggaaaccatttcccctggatactctatccacacctatctctggagaagacag

SEQ ID NO: 1576 - protein, 536 aa, synthetic construct
  REGION 1..536: note = Variant of B-Glucocerebrosidase
MEFSSPSREECPKPLSRVSIMAGSLTGLLLLQAVSWASGARPCIPKSFGYSSVVCVCNATYCDSVDPLTLPALGTFSRYESTRSGRRMELSMGPIQANHTGTGLLLTLQPEQKFQKVKGFGGAMTDAAALNILALSPPAQNLLLKSYFSEEGIGYNIIRVPMASCDFSIRTYTYADTPDDFQLHNFSLPEEDTKLKIPLIHRALQLSQRPVSLLASPWTSPTWLKTNGAYNGKGSLKGQPGDIYHQTWARYFVKFLDAYAEHKLQFWAVTAENEPSAGLLSGYPFQCLGFTPEHQRDFIARDLGPTLANSTHHNVRLLMLDDQRLLLPHWAKVVLTDPEAAKYVHGIAVHWYLDFLAPAKATLGETHRLFPNTTLFASEACVGSKFWEQSVRLGSWDRGMQYSHSIIENLLYHVVGWTDWNLALNPEGGPNWVRNFVDSPIIVDITKDTFYKQPMFYHLGHFSKFIPEGSQRVGLVASQKNDLDAVALMHPDGSAVVVVLNRSSKDVPLTIKDPAVGFLETISPGYSIHTYLWRRQ

SEQ ID NO: 1577 - DNA, 1608 bp, synthetic construct
  misc_feature 1..1608: note = Variant of B-Glucocerebrosidase
  source 1..1608: mol_type = other DNA
atggagttttcttctcctagtagagaagaatgccccaagccactgagcagggtgagcatcatggctggatccctcacagggctgcttcttttgcaggcagtctcatgggcctctggagccaggccctgtattcccaagtcattcggctactcctcagtggtgtgtgtatgcaatgccacctattgtgacagtgtcgatcctctcactctccctgctctgggtaccttctcccggtatgagagcacaagaagtggaagacgcatggagctctcaatgggccctatacaggctaaccacactgggacaggtctgctgctgaccctccaacctgaacagaagtttcagaaagtcaagggatttggaggagccatgactgatgcagcagcactcaacatcttggccctgtctccaccagcccagaacctgctgttgaagtcctacttctcagaggaggggattggctacaacatcatccgggttcccatggctagctgtgacttctccattaggacctatacatacgctgacacccccgatgattttcagctccataatttcagtctccctgaagaagacaccaaactgaagatacctctgattcacagagccttgcaactggcacaaaggccagtgagcctcttcgcttctccctggactagtcctacatggctgaagactaatggtgcttacaatgggaagggctccctgaaaggacagccaggtgacatatatcatcagacatgggcccgctactttgtgaaattccttgatgcctatgcagagcacgggctccaattctgggcagtcaccgcagaaaacgagccctcagctgggctgctgtctggctacccctttcagtgcttgggctttactcctgagcatcaacgggacttcattgcccgggatttggggccaacactggccaacagcacccaccacaatgtaagactcctcatgctggatgaccagaggctgctgctccctcattgggccaaggtggtgttgacaaacccagaagctgccaaatatgttcatggcatcgctgtccactggtacctggattttttggcccctgccaaggctactctgggagagacccacagactcttccccaataccacactgtttgcatcagaagcctgcgtggggagcaaattctgggagcagtctgttaggctgggttcctgggatcggggcatgcaatattcccatagtataatagagaacctcctctaccacgtggtaggatggacagactggaatctggctttgaacccagaaggaggccccaattgggtgcgcaactttgttgacagccccatcattgtggatatcacaaaggacaccttctacaaacagcctatgttctatcatctggggcactttagcaagttcattccagagggttcccagagagtaggcttggttgcctcacagaagaatgatctggatgctgtggcactcatgcatcctgacgggagtgcagtggtggtagtactgaacaggtctagcaaagatgttcccttgactatcaaagacccagctgtgggctttctggaaaccatttcccctggatactctatccacacctatctctggagaagacag

SEQ ID NO: 1578 - protein, 536 aa, synthetic construct
  REGION 1..536: note = Variant of B-Glucocerebrosidase
MEFSSPSREECPKPLSRVSIMAGSLTGLLLLQAVSWASGARPCIPKSFGYSSVVCVCNATYCDSVDPLTLPALGTFSRYESTRSGRRMELSMGPIQANHTGTGLLLTLQPEQKFQKVKGFGGAMTDAAALNILALSPPAQNLLLKSYFSEEGIGYNIIRVPMASCDFSIRTYTYADTPDDFQLHNFSLPEEDTKLKIPLIHRALQLAQRPVSLFASPWTSPTWLKTNGAYNGKGSLKGQPGDIYHQTWARYFVKFLDAYAEHGLQFWAVTAENEPSAGLLSGYPFQCLGFTPEHQRDFIARDLGPTLANSTHHNVRLLMLDDQRLLLPHWAKVVLTNPEAAKYVHGIAVHWYLDFLAPAKATLGETHRLFPNTTLFASEACVGSKFWEQSVRLGSWDRGMQYSHSIIENLLYHVVGWTDWNLALNPEGGPNWVRNFVDSPIIVDITKDTFYKQPMFYHLGHFSKFIPEGSQRVGLVASQKNDLDAVALMHPDGSAVVVVLNRSSKDVPLTIKDPAVGFLETISPGYSIHTYLWRRQ

SEQ ID NO: 1579 - DNA, 1608 bp, synthetic construct
  misc_feature 1..1608: note = Variant of B-Glucocerebrosidase
  source 1..1608: mol_type = other DNA
atggagttttcttctcctagtagagaagaatgccccaagccactgagcagggtgagcatcatggctggatccctcacagggctgcttcttttgcaggcagtctcatgggcctctggagccaggccctgtattcccaagtcattcggctactcctcagtggtgtgtgtatgcaatgccacctattgtgacagttttgatcctccaactttccctgctctgggtaccttctcccggtatgagagcacaagaagtggaagacgcatggagctctcaatgggccctatacaggctaaccacactgggacaggtctgctgctgaccctccaacctgaacagaagtttcagaaagtcaagggatttggaggagccatgactgatgcagcagcactcaacatcttggccctgtctccaccagcccagaacctgctgttgaagtcctacttctcagaggaggggattggctacaacatcatccgggttcccatggctagctgtgacttctccattaggacctatacatacgctgacacccccgatgattttcagctccataatttcagtctccctgaagaagacaccaaactgaagatacctctgattcacagagccttgcaactggcacaaaggccagtgagcctcttcgcttctccctggactagtcctacatggctgaagactaatggtgcttacaatgggaagggctccctgaaaggacagccaggtgacatatatcatcagacatgggcccgctactttgtgaaattccttgatgcctatgcagagcacgggctccaattctgggcagtcaccgcagaaaacgagccctcagctgggctgctgtctggctacccctttcagtgcttgggctttactcctgagcatcaacgggacttcattgcccgggatttggggccaacactggccaacagcacccaccacaatgtaagactcctcatgctggatgaccagaggctgctgctccctcattgggccaaggtggtgttgacagacccagaagctgccaaatatgttcatggcatcgctgtccactggtacctggattttttggcccctgccaaggctactctgggagagacccacagactcttccccaataccacactgtttgcatcagaagcctgcgtggggagcaaattctgggagcagtctgttaggctgggttcctgggatcggggcatgcaatattcccatagtataatagagaacctcctctaccacgtggtaggatggacagactggaatctggctttgaacccagaaggaggccccaattgggtgcgcaactttgttgacagccccatcattgtggatatcacaaaggacaccttctacaaacagcctatgttctatcatctggggcactttagcaagttcattccagagggttcccagagagtaggcttggttgcctcacagaagaatgatctggatgctgtggcactcatgcatcctgacgggagtgcagtggtggtagtactgaacaggtctagcaaagatgttcccttgactatcaaagacccagctgtgggctttctggaaaccatttcccctggatactctatccacacctatctctggagaagacag

SEQ ID NO: 1580 - protein, 536 aa, synthetic construct
  REGION 1..536: note = Variant of B-Glucocerebrosidase
MEFSSPSREECPKPLSRVSIMAGSLTGLLLLQAVSWASGARPCIPKSFGYSSVVCVCNATYCDSFDPPTFPALGTFSRYESTRSGRRMELSMGPIQANHTGTGLLLTLQPEQKFQKVKGFGGAMTDAAALNILALSPPAQNLLLKSYFSEEGIGYNIIRVPMASCDFSIRTYTYADTPDDFQLHNFSLPEEDTKLKIPLIHRALQLAQRPVSLFASPWTSPTWLKTNGAYNGKGSLKGQPGDIYHQTWARYFVKFLDAYAEHGLQFWAVTAENEPSAGLLSGYPFQCLGFTPEHQRDFIARDLGPTLANSTHHNVRLLMLDDQRLLLPHWAKVVLTDPEAAKYVHGIAVHWYLDFLAPAKATLGETHRLFPNTTLFASEACVGSKFWEQSVRLGSWDRGMQYSHSIIENLLYHVVGWTDWNLALNPEGGPNWVRNFVDSPIIVDITKDTFYKQPMFYHLGHFSKFIPEGSQRVGLVASQKNDLDAVALMHPDGSAVVVVLNRSSKDVPLTIKDPAVGFLETISPGYSIHTYLWRRQ

SEQ ID NO: 1581 - DNA, 1608 bp, synthetic construct
  misc_feature 1..1608: note = Variant of B-Glucocerebrosidase
  source 1..1608: mol_type = other DNA
atggagttttcttctcctagtagagaagaatgccccaagccactgagcagggtgagcatcatggctggatccctcacagggctgcttcttttgcaggcagtctcatgggcctctggagccaggccctgtattcccaagtcattcggctactcctcagtggtgtgtgtatgcaatgccacctattgtgacagtgtcgatcctctcactctccctgctctgggtaccttctcccggtatgagagcacaagaagtggaagacgcatggagctctcaatgggccctatacaggctaaccgcactgggacaggtctgctgctgaccctccaacctgaacagaagtttcagaaagtcaagggatttggaggagccatgactgatgcagcagcactcaacatcttggccctgtctccaccagcccagaacctgctgttgaagtcctacttctcagaggaggggattgagtacaacatcatccgggttcccatggctagctgtgacttctccattaggacctatacatacgctgacacccccgatgattttcagctccataatttcagtctccctgaagaagacaccaaatggaagatacctctgattcacagagccttgcaactgtcccaaaggccagtgagcctcttggcttctccctggactagtcctacatggctgaagactaatggtgcttacaatgggaagggctccctgaaaggacagccaggtgacatatatcatcagacatgggcccgctactttgtgaaattccttgatgcctatgcagagcacaagctccaattctgggcagtcaccgcagaaaacgagccctcagctgggctgctgtctggctacccctttcagtgcttgggctttactcctgagcatcaacgggacttcattgcccgggatttggggccaacactggccaacagcacccaccacaatgtaagactcctcatgctggatgaccagaggctgctgctccctcattgggccaaggtggtgttgacagacccagaagctgccaaatatgttcatggcatcgctgtccactggtacctggattttttggcccctgccaaggctactctgggagagacccacagactcttccccaataccatgctgtttgcatcagaagcctgcgtggggagcaaattctgggagcagtctgttaggctgggttcctgggatcggggcatgcaatattcccatagtataatagagaacctcctctaccacgtggtaggatggacagactggaatctggctttgaacccagaaggaggccccaattgggtgcgcaactttgttgacagccccatcattgtggatatcacaaaggacaccttctacaaacagcctatgttctatcatctggggcactttagcaagttcattccagagggttcccagagagtaggcttggttgcctcacagaagaatgatctggatgctgtggcactcatgcatcctgacgggagtgcagtggtggtagtactgaacaggtctagcaaagatgttcccttgactatcaaagacccagctgtgggctttctggaaaccatttcccctggatactctatccacacctatctctggagaagacag

SEQ ID NO: 1582 - protein, 536 aa, synthetic construct
  REGION 1..536: note = Variant of B-Glucocerebrosidase
MEFSSPSREECPKPLSRVSIMAGSLTGLLLLQAVSWASGARPCIPKSFGYSSVVCVCNATYCDSVDPLTLPALGTFSRYESTRSGRRMELSMGPIQANRTGTGLLLTLQPEQKFQKVKGFGGAMTDAAALNILALSPPAQNLLLKSYFSEEGIEYNIIRVPMASCDFSIRTYTYADTPDDFQLHNFSLPEEDTKWKIPLIHRALQLSQRPVSLLASPWTSPTWLKTNGAYNGKGSLKGQPGDIYHQTWARYFVKFLDAYAEHKLQFWAVTAENEPSAGLLSGYPFQCLGFTPEHQRDFIARDLGPTLANSTHHNVRLLMLDDQRLLLPHWAKVVLTDPEAAKYVHGIAVHWYLDFLAPAKATLGETHRLFPNTMLFASEACVGSKFWEQSVRLGSWDRGMQYSHSIIENLLYHVVGWTDWNLALNPEGGPNWVRNFVDSPIIVDITKDTFYKQPMFYHLGHFSKFIPEGSQRVGLVASQKNDLDAVALMHPDGSAVVVVLNRSSKDVPLTIKDPAVGFLETISPGYSIHTYLWRRQ

SEQ ID NO: 1583 - DNA, 1608 bp, synthetic construct
  misc_feature 1..1608: note = Variant of B-Glucocerebrosidase
  source 1..1608: mol_type = other DNA
atggagttttcttctcctagtagagaagaatgccccaagccactgagcagggtgagcatcatggctggatccctcacagggctgcttcttttgcaggcagtctcatgggcctctggagccaggccctgtattcccaagtcattcggctactcctcagtggtgtgtgtatgcaatgccacctattgtgacagtgtcgatcctctcactctccctgctctgggtaccttctcccggtatgagagcacaagaagtggaagacgcatggagctctcaatgggccctatacaggctaaccgcactgggacaggtctgctgctgaccctccaacctgaacagaagtttcagaaagtcaagggatttggaggagccatgactgatgcagcagcactcaacatcttggccctgtctccaccagcccagaacctgctgttgaagtcctacttctcagaggaggggattgagtacaacatcatccgggttcccatggctagctgtgacttctccattaggacctatacatacgctgacacccccgatgattttcagctccataatttcagtctccctgaagaagacaccaaactgaagatacctctgattcacagagccttgcaactgtcccaaaggccagtgagcctcttggcttctccctggactagtcctacatggctgaagactaatggtgcttacaatgggaagggctccctgaaaggacagccaggtgacatatatcatcagacatgggcccgctactttgtgaaattccttgatgcctatgcagagcacaagctccaattctgggcagtcaccgcagaaaacgagccctcagctgggctgctgtctggctacccctttcagtgcttgggctttactcctgagcatcaacgggacttcattgcccgggatttggggccaacactggccaacagcacccaccacaatgtaagactcctcattctggatgaccagaggctgctgctccctcattgggccaaggtggtgttgacagacccagaagctgccaaatatgttcatggcatcgctgtccactggtacctggattttttggcccctgccaaggctactctgggagagacccacagactcttccccaataccatgctgtttgcatcagaagcctgcgtggggagcaaattctgggagcagtctgttaggctgggttcctgggatcggggcatgcaatattcccatagtataatagagaacctcctctaccacgtggtaggatggacagactggaatctggctttgaacccagaaggaggccccaattgggtgcgcaactttgttgacagccccatcattgtggatatcacaaaggacaccttctacaaacagcctatgttctatcatctggggcactttagcaagttcattccagagggttcccagagagtaggcttggttgcctcacagaagaatgatctggatgctgtggcactcatgcatcctgacgggagtgcagtggtggtagtactgaacaggtctagcaaagatgttcccttgactatcaaagacccagctgtgggctttctggaaaccatttcccctggatactctatccacacctatctctggagaagacag

SEQ ID NO: 1584 - protein, 536 aa, synthetic construct
  REGION 1..536: note = Variant of B-Glucocerebrosidase
MEFSSPSREECPKPLSRVSIMAGSLTGLLLLQAVSWASGARPCIPKSFGYSSVVCVCNATYCDSVDPLTLPALGTFSRYESTRSGRRMELSMGPIQANRTGTGLLLTLQPEQKFQKVKGFGGAMTDAAALNILALSPPAQNLLLKSYFSEEGIEYNIIRVPMASCDFSIRTYTYADTPDDFQLHNFSLPEEDTKLKIPLIHRALQLSQRPVSLLASPWTSPTWLKTNGAYNGKGSLKGQPGDIYHQTWARYFVKFLDAYAEHKLQFWAVTAENEPSAGLLSGYPFQCLGFTPEHQRDFIARDLGPTLANSTHHNVRLLILDDQRLLLPHWAKVVLTDPEAAKYVHGIAVHWYLDFLAPAKATLGETHRLFPNTMLFASEACVGSKFWEQSVRLGSWDRGMQYSHSIIENLLYHVVGWTDWNLALNPEGGPNWVRNFVDSPIIVDITKDTFYKQPMFYHLGHFSKFIPEGSQRVGLVASQKNDLDAVALMHPDGSAVVVVLNRSSKDVPLTIKDPAVGFLETISPGYSIHTYLWRRQ

SEQ ID NO: 1585 - DNA, 1608 bp, synthetic construct
  misc_feature 1..1608: note = Variant of B-Glucocerebrosidase
  source 1..1608: mol_type = other DNA
atggagttttcttctcctagtagagaagaatgccccaagccactgagcagggtgagcatcatggctggatccctcacagggctgcttcttttgcaggcagtctcatgggcctctggagccaggccctgtattcccaagtcattcggctactcctcagtggtgtgtgtatgcaatgccacctattgtgacagtgtcgatcctctcactctccctgctctgggtaccttctcccggtatgagagcacaagaagtggaagacgcatggagctctcaatgggccctatacaggctaaccacactgggacaggtctgctgctgaccctccaacctgaacagaagtttcagaaagtcaagggatttggaggagccatgactgatgcagcagcactcaacatcttggccctgtctccaccagcccagaacctgctgttgaagtcctacttctcagaggaggggattggctacaacatcatccgggttcccatggctagctgtgacttctccattaggacctatacatacgctgacacccccgatgattttcagctccataatttcagtctccctgaagaagacaccaaactgaagatacctctgattcacagagccttgcaactggcacaaaggccagtgagcctcttcgcttctccctggactagtcctacatggctgaagactaatggtgcttacaatgggaagggctccctgaaaggacagccaggtgacatatatcatcagacatgggcccgctactttgtgaaattccttgatgcctatgcagagcacaagctccaattctgggcagtcaccgcagaaaacgagccctcagctgggctgctgtctggctacccctttcagtgcttgggctttactcctgagcatcaacgggacttcattgcccgggatttggggccaacactggccaacagcacccaccacaatgtaagactcctcatgctggatgaccagaggctgctgctccctcattgggccaaggtggtgttgacagacccagaagctgccaaatatgttcatggcatcgctgtccactggtacctggattttttggcccctgccaaggctactctgggagagacccacagactcttccccaataccatgctgtttgcatcagaagcctgcgtggggagcaaattctgggagcagtctgttaggctgggttcctgggatcggggcatgcaatattcccatagtataatagagaacctcctctaccacgtggtaggatggacagactggaatctggctttgaacccagaaggaggccccaattgggtgcgcaactttgttgacagccccatcattgtggatatcacaaaggacaccttctacaaacagcctatgttctatcatctggggcactttagcaagttcattccagagggttcccagagagtaggcttggttgcctcacagaagaatgatctggatgctgtggcactcatgcatcctgacgggagtgcagtggtggtagtactgaacaggtctagcaaagatgttcccttgactatcaaagacccagctgtgggctttctggaaaccatttcccctggatactctatccacacctatctctggagaagacag

SEQ ID NO: 1586 - protein, 536 aa, synthetic construct
  REGION 1..536: note = Variant of B-Glucocerebrosidase
MEFSSPSREECPKPLSRVSIMAGSLTGLLLLQAVSWASGARPCIPKSFGYSSVVCVCNATYCDSVDPLTLPALGTFSRYESTRSGRRMELSMGPIQANHTGTGLLLTLQPEQKFQKVKGFGGAMTDAAALNILALSPPAQNLLLKSYFSEEGIGYNIIRVPMASCDFSIRTYTYADTPDDFQLHNFSLPEEDTKLKIPLIHRALQLAQRPVSLFASPWTSPTWLKTNGAYNGKGSLKGQPGDIYHQTWARYFVKFLDAYAEHKLQFWAVTAENEPSAGLLSGYPFQCLGFTPEHQRDFIARDLGPTLANSTHHNVRLLMLDDQRLLLPHWAKVVLTDPEAAKYVHGIAVHWYLDFLAPAKATLGETHRLFPNTMLFASEACVGSKFWEQSVRLGSWDRGMQYSHSIIENLLYHVVGWTDWNLALNPEGGPNWVRNFVDSPIIVDITKDTFYKQPMFYHLGHFSKFIPEGSQRVGLVASQKNDLDAVALMHPDGSAVVVVLNRSSKDVPLTIKDPAVGFLETISPGYSIHTYLWRRQ

SEQ ID NO: 1587 - DNA, 1608 bp, synthetic construct
  misc_feature 1..1608: note = Variant of B-Glucocerebrosidase
  source 1..1608: mol_type = other DNA
atggagttttcttctcctagtagagaagaatgccccaagccactgagcagggtgagcatcatggctggatccctcacagggctgcttcttttgcaggcagtctcatgggcctctggagccaggccctgtattcccaagtcattcggctactcctcagtggtgtgtgtatgcaatgccacctattgtgacagtgtcgatcctctcactctccctgctctgggtaccttctcccggtatgagagcacaagaagtggaagacgcatggagctctcaatgggccctatacaggctaaccacactgggacaggtctgctgctgaccctccaacctgaacagaagtttcagaaagtcaagggatttggaggagccatgactgatgcagcagcactcaacatcttggccctgtctccaccagcccagaacctgctgttgaagtcctacttctcagaggaggggattggctacaacatcatccgggttcccatggctagctgtgacttctccattaggacctatacatacgctgacacccccgatgattttcagctccataatttcagtctccctgaagaagacaccaaatggaagatacctctgattcacagagccttgcaactggcacaaaggccagtgagcctcttcgcttctccctggactagtcctacatggctgaagactaatggtgcttacaatgggaagggctccctgaaaggacagccaggtgacatatatcatcagacatgggcccgctactttgtgaaattccttgatgcctatgcagagcacgggctccaattctgggcagtcaccgcagaaaacgagccctcagctgggctgctgtctggctacccctttcagtgcttgggctttactcctgagcatcaacgggacttcattgcccgggatttggggccaacactggccaacagcacccaccacaatgtaagactcctcatgctggatgaccagaggctgctgctccctcattgggccaaggtggtgttgacagacccagaagctgccaaatatgttcatggcatcgctgtccactggtacctggattttttggcccctgccaagtggactctgggagagacccacagactcttccccaataccatgctgtttgcatcagaagcctgcgtggggagcaaattctgggagcagtctgttaggctgggttcctgggatcggggcatgcaatattcccatagtataataactaacctcctctaccacgtggtaggatggacagactggaatctggctttgaacccagaaggaggccccaattgggtgcgcaactttgttgacagccccatcattgtggatatcacaaaggacaccttctacaaacagcctatgttctatcatctggggcactttagcaagttcattccagagggttccactagagtaggcttggttgcctcacagaagaatgatctggatgctgtggcactcatgcatcctgacgggagtgcagtggtggtagtactgaacaggtctagcaaagatgttcccttgactatcaaagacccagctgtgggctttctggaaaccatttcccctggatactctatccacacctatctctggagaagacag

SEQ ID NO: 1588 - protein, 536 aa, synthetic construct
  REGION 1..536: note = Variant of B-Glucocerebrosidase
MEFSSPSREECPKPLSRVSIMAGSLTGLLLLQAVSWASGARPCIPKSFGYSSVVCVCNATYCDSVDPLTLPALGTFSRYESTRSGRRMELSMGPIQANHTGTGLLLTLQPEQKFQKVKGFGGAMTDAAALNILALSPPAQNLLLKSYFSEEGIGYNIIRVPMASCDFSIRTYTYADTPDDFQLHNFSLPEEDTKWKIPLIHRALQLAQRPVSLFASPWTSPTWLKTNGAYNGKGSLKGQPGDIYHQTWARYFVKFLDAYAEHGLQFWAVTAENEPSAGLLSGYPFQCLGFTPEHQRDFIARDLGPTLANSTHHNVRLLMLDDQRLLLPHWAKVVLTDPEAAKYVHGIAVHWYLDFLAPAKWTLGETHRLFPNTMLFASEACVGSKFWEQSVRLGSWDRGMQYSHSIITNLLYHVVGWTDWNLALNPEGGPNWVRNFVDSPIIVDITKDTFYKQPMFYHLGHFSKFIPEGSTRVGLVASQKNDLDAVALMHPDGSAVVVVLNRSSKDVPLTIKDPAVGFLETISPGYSIHTYLWRRQ

SEQ ID NO: 1589 - DNA, 1608 bp, synthetic construct
  misc_feature 1..1608: note = Variant of B-Glucocerebrosidase
  source 1..1608: mol_type = other DNA
atggagttttcttctcctagtagagaagaatgccccaagccactgagcagggtgagcatcatggctggatccctcacagggctgcttcttttgcaggcagtctcatgggcctctggagccaggccctgtattcccaagtcattcggctactcctcagtggtgtgtgtatgcaatgccacctattgtgacagttttgatcctccaactttccctgctctgggtaccttctcccggtatgagagcacaagaagtggaagacgcatggagctctcaatgggccctatacaggctaaccacactgggacaggtctgctgctgaccctccaacctgaacagaagtttcagaaagtcaagggatttggaggagccatgactgatgcagcagcactcaacatcttggccctgtctccaccagcccagaacctgctgttgaagtcctacttctcagaggaggggattggctacaacatcatccgggttcccatggctagctgtgacttctccattaggacctatacatacgctgacacccccgatgattttcagctccataatttcagtctccctgaagaagacaccaaatggaagatacctctgattcacagagccttgcaactgtcccaaaggccagtgagcctcttggcttctccctggactagtcctacatggctgaagactaatggtgcttacaatgggaagggctccctgaaaggacagccaggtgacatatatcatcagacatgggcccgctactttgtgaaattccttgatgcctatgcagagcacaagctccaattctgggcagtcaccgcagaaaacgagccctcagctgggctgctgtctggctacccctttcagtgcttgggctttactcctgagcatcaacgggacttcattgcccgggatttggggccaacactggccaacagcacccaccacaatgtaagactcctcattctggatgaccagaggctgctgctccctcattgggccaaggtggtgttgacagacccagaagctgccaaatatgttcatggcatcgctgtccactggtacctggattttttggcccctgccaaggctactctgggagagacccacagactcttccccaataccacactgtttgcatcagaagcctgcgtggggagcaaattctgggagcagtctgttaggctgggttcctgggatcggggcatgcaatattcccatagtataatagagaacctcctctaccacgtggtaggatggacagactggaatctggctttgaacccagaaggaggccccaattgggtgcgcaactttgttgacagccccatcattgtggatatcacaaaggacaccttctacaaacagcctatgttctatcatctggggcactttagcaagttcattccagagggttcccagagagtaggcttggttgcctcacagaagaatgatctggatgctgtggcactcctgcatcctgacgggagtgcagtggtggtagtactgaacaggtctagcaaagatgttcccttgactatcaaagacccagctgtgggctttctggaaaccatttcccctggatactctatccacacctatctctggagaagacag

SEQ ID NO: 1590 - protein, 536 aa, synthetic construct
  REGION 1..536: note = Variant of B-Glucocerebrosidase
MEFSSPSREECPKPLSRVSIMAGSLTGLLLLQAVSWASGARPCIPKSFGYSSVVCVCNATYCDSFDPPTFPALGTFSRYESTRSGRRMELSMGPIQANHTGTGLLLTLQPEQKFQKVKGFGGAMTDAAALNILALSPPAQNLLLKSYFSEEGIGYNIIRVPMASCDFSIRTYTYADTPDDFQLHNFSLPEEDTKWKIPLIHRALQLSQRPVSLLASPWTSPTWLKTNGAYNGKGSLKGQPGDIYHQTWARYFVKFLDAYAEHKLQFWAVTAENEPSAGLLSGYPFQCLGFTPEHQRDFIARDLGPTLANSTHHNVRLLILDDQRLLLPHWAKVVLTDPEAAKYVHGIAVHWYLDFLAPAKATLGETHRLFPNTTLFASEACVGSKFWEQSVRLGSWDRGMQYSHSIIENLLYHVVGWTDWNLALNPEGGPNWVRNFVDSPIIVDITKDTFYKQPMFYHLGHFSKFIPEGSQRVGLVASQKNDLDAVALLHPDGSAVVVVLNRSSKDVPLTIKDPAVGFLETISPGYSIHTYLWRRQ

SEQ ID NO: 1591 - DNA, 1608 bp, synthetic construct
  misc_feature 1..1608: note = Variant of B-Glucocerebrosidase
  source 1..1608: mol_type = other DNA
atggagttttcttctcctagtagagaagaatgccccaagccactgagcagggtgagcatcatggctggatccctcacagggctgcttcttttgcaggcagtctcatgggcctctggagccaggccctgtattcccaagtcattcggctactcctcagtggtgtgtgtatgcaatgccacctattgtgacagtgtcgatcctctcactctccctgctctgggtaccttctcccggtatgagagcacaagaagtggaagacgcatggagctctcaatgggccctatacaggctaaccacactgggacaggtctgctgctgaccctccaacctgaacagaagtttcagaaagtcaagggatttggaggagccatgactgatgcagcagcactcaacatcttggccctgtctccaccagcccagaacctgctgttgaagtcctacttctcagaggaggggattggctacaacatcatccgggttcccatggctagctgtgacttctccattaggacctatacatacgctgacacccccgatgattttcagctccataatttcagtctccctgaagaagacaccaaactgaagatacctctgattcacagagccttgcaactggcacaaaggccagtgagcctcttcgcttctccctggactagtcctacatggctgaagactaatggtgcttacaatgggaagggctccctgaaaggacagccaggtgacatatatcatcagacatgggcccgctactttgtgaaattccttgatgcctatgcagagcacaagctccaattctgggcagtcaccgcagaaaacgagccctcagctgggctgctgtctggctacccctttcagtgcttgggctttactcctgagcatcaacgggacttcattgcccgggatttggggccaacactggccaacagcacccaccacaatgtaagactcctcatgctggatgaccagaggctgctgctccctcattgggccaaggtggtgttgacagacccagaagctgccaaatatgttcatggcatcgctgtccactggtacctggattttttggcccctgccaaggctactctgggagagacccacagactcttccccaataccatgctgtttgcatcagaagcctgcgtggggagcaaattctgggagcagtctgttaggctgggttcctgggatcggggcatgcaatattcccatagtataatagagaacctcctctaccacgtggtaggatggacagactggaatctggctttgaacccagaaggaggccccaattgggtgcgcaactttgttgacagccccatcattgtggatatcacaaaggacaccttctacaaacagcctatgttctatcatctggggcactttagcaagttcattccagagggttcccagagagtaggcttggttgcctcacagaagaatgatctggatgctgtggcactcctgcatcctgacgggagtgcagtggtggtagtactgaacaggtctagcaaagatgttcccttgactatcaaagacccagctgtgggctttctggaaaccatttcccctggatactctatccacacctatctctggagaagacag

SEQ ID NO: 1592 - protein, 536 aa, synthetic construct
  REGION 1..536: note = Variant of B-Glucocerebrosidase
MEFSSPSREECPKPLSRVSIMAGSLTGLLLLQAVSWASGARPCIPKSFGYSSVVCVCNATYCDSVDPLTLPALGTFSRYESTRSGRRMELSMGPIQANHTGTGLLLTLQPEQKFQKVKGFGGAMTDAAALNILALSPPAQNLLLKSYFSEEGIGYNIIRVPMASCDFSIRTYTYADTPDDFQLHNFSLPEEDTKLKIPLIHRALQLAQRPVSLFASPWTSPTWLKTNGAYNGKGSLKGQPGDIYHQTWARYFVKFLDAYAEHKLQFWAVTAENEPSAGLLSGYPFQCLGFTPEHQRDFIARDLGPTLANSTHHNVRLLMLDDQRLLLPHWAKVVLTDPEAAKYVHGIAVHWYLDFLAPAKATLGETHRLFPNTMLFASEACVGSKFWEQSVRLGSWDRGMQYSHSIIENLLYHVVGWTDWNLALNPEGGPNWVRNFVDSPIIVDITKDTFYKQPMFYHLGHFSKFIPEGSQRVGLVASQKNDLDAVALLHPDGSAVVVVLNRSSKDVPLTIKDPAVGFLETISPGYSIHTYLWRRQ

SEQ ID NO: 1593 - DNA, 1608 bp, synthetic construct
  misc_feature 1..1608: note = Variant of B-Glucocerebrosidase
  source 1..1608: mol_type = other DNA
atggagttttcttctcctagtagagaagaatgccccaagccactgagcagggtgagcatcatggctggatccctcacagggctgcttcttttgcaggcagtctcatgggcctctggagccaggccctgtattcccaagtcattcggctactcctcagtggtgtgtgtatgcaatgccacctattgtgacagtgtcgatcctctcactctccctgctctgggtaccttctcccggtatgagagcacaagaagtggaagacgcatggagctctcaatgggccctatacaggctaaccacactgggacaggtctgctgctgaccctccaacctgaacagaagtttcagaaagtcaagggatttggaggagccatgactgatgcagcagcactcaacatcttggccctgtctccaccagcccagaacctgctgttgaagtcctacttctcagaggaggggattggctacaacatcatccgggttcccatggctagctgtgacttctccattaggacctatacatacgctgacacccccgatgattttcagctccataatttcagtctccctgaagaagacaccaaatggaagatacctctgattcacagagccttgcaactgtcccaaaggccagtgagcctcttggcttctccctggactagtcctacatggctgaagactaatggtgcttacaatgggaagggctccctgaaaggacagccaggtgacatatatcatcagacatgggcccgctactttgtgaaattccttgatgcctatgcagagcacaagctccaattctgggcagtcaccgcagaaaacgagccctcagctgggctgctgtctggctacccctttcagtgcttgggctttactcctgagcatcaacgggacttcattgcccgggatttggggccaacactggccaacagcacccaccacaatgtaagactcctcatgctggatgaccagaggctgctgctccctcattgggccaaggtggtgttgacagacccagaagctgccaaatatgttcatggcatcgctgtccactggtacctggattttttggcccctgccaaggctactctgggagagacccacagactctttcccaataccatgctgtttgcatcagaagcctgcgtggggagcaaattctgggagcagtctgttaggctgggttcctgggatcggggcatgcaatattcccatagtataatagagaacctcctctaccacgtggtaggatggacagactggaatctggctttgaacccagaaggaggccccaattgggtgcgcaactttgttgacagccccatcattgtggatatcacaaaggacaccttctacaaacagcctatgttctatcatctggggcactttagcaagttcattccagagggttcccagagagtaggcttggttgcctcacagaagaatgatctggatgctgtggcactcatgcatcctgacgggagtgcagtggtggtagtactgaacaggtctagcaaagatgttcccttgactatcaaagacccagctgtgggctttctggaaaccatttcccctggatactctatccacacctatctctggagaagacag

SEQ ID NO: 1594 - protein, 536 aa, synthetic construct
  REGION 1..536: note = Variant of B-Glucocerebrosidase
MEFSSPSREECPKPLSRVSIMAGSLTGLLLLQAVSWASGARPCIPKSFGYSSVVCVCNATYCDSVDPLTLPALGTFSRYESTRSGRRMELSMGPIQANHTGTGLLLTLQPEQKFQKVKGFGGAMTDAAALNILALSPPAQNLLLKSYFSEEGIGYNIIRVPMASCDFSIRTYTYADTPDDFQLHNFSLPEEDTKWKIPLIHRALQLSQRPVSLLASPWTSPTWLKTNGAYNGKGSLKGQPGDIYHQTWARYFVKFLDAYAEHKLQFWAVTAENEPSAGLLSGYPFQCLGFTPEHQRDFIARDLGPTLANSTHHNVRLLMLDDQRLLLPHWAKVVLTDPEAAKYVHGIAVHWYLDFLAPAKATLGETHRLFPNTMLFASEACVGSKFWEQSVRLGSWDRGMQYSHSIIENLLYHVVGWTDWNLALNPEGGPNWVRNFVDSPIIVDITKDTFYKQPMFYHLGHFSKFIPEGSQRVGLVASQKNDLDAVALMHPDGSAVVVVLNRSSKDVPLTIKDPAVGFLETISPGYSIHTYLWRRQ

SEQ ID NO: 1595 - DNA, 1608 bp, synthetic construct
  misc_feature 1..1608: note = Variant of B-Glucocerebrosidase
  source 1..1608: mol_type = other DNA
atggagttttcttctcctagtagagaagaatgccccaagccactgagcagggtgagcatcatggctggatccctcacagggctgcttcttttgcaggcagtctcatgggcctctggagccaggccctgtattcccaagtcattcggctactcctcagtggtgtgtgtatgcaatgccacctattgtgacagttttgatcctccaactttccctgctctgggtaccttctcccggtatgagagcacaagaagtggaagacgcatggagctctcaatgggccctatacaggctaaccacactgggacaggtctgctgctgaccctccaacctgaacagaagtttcagaaagtcaagggatttggaggagccatgactgatgcagcagcactcaacatcttggccctgtctccaccagcccagaacctgctgttgaagtcctacttctcagaggaggggattggctacaacatcatccgggttcccatggctagctgtgacttctccattaggacctatacatacgctgacacccccgatgattttcagctccataatttcagtctccctgaagaagacaccaaactgaagatacctctgattcacagagccttgcaactgtcccaaaggccagtgagcctcttggcttctccctggactagtcctacatggctgaagactaatggtgcttacaatgggaagggctccctgaaaggacagccaggtgacatatatcatcagacatgggcccgctactttgtgaaattccttgatgcctatgcagagcacaagctccaattctgggcagtcaccgcagaaaacgagccctcagctgggctgctgtctggctacccctttcagtgcttgggctttactcctgagcatcaacgggacttcattgcccgggatttggggccaacactggccaacagcacccaccacaatgtaagactcctcattctggatgaccagaggctgctgctccctcattgggccaaggtggtgttgacagacccagaagctgccaaatatgttcatggcatcgctgtccactggtacctggattttttggcccctgccaaggctactctgggagagacccacagactcttccccaataccacactgtttgcatcagaagcctgcgtggggagcaaattctgggagcagtctgttaggctgggttcctgggatcggggcatgcaatattcccatagtataatagagaacctcctctaccacgtggtaggatggacagactggaatctggctttgaacccagaaggaggccccaattgggtgcgcaactttgttgacagccccatcattgtggatatcacaaaggacaccttctacaaacagcctatgttctatcatctggggcactttagcaagttcattccagagggttcccagagagtaggcttggttgcctcacagaagaatgatctggatgctgtggcactcatgcatcctgacgggagtgcagtggtggtagtactgaacaggtctagcaaagatgttcccttgactatcaaagacccagctgtgggctttctggaaaccatttcccctggatactctatccacacctatctctggagaagacag

SEQ ID NO: 1596 - protein, 536 aa, synthetic construct
  REGION 1..536: note = Variant of B-Glucocerebrosidase
MEFSSPSREECPKPLSRVSIMAGSLTGLLLLQAVSWASGARPCIPKSFGYSSVVCVCNATYCDSFDPPTFPALGTFSRYESTRSGRRMELSMGPIQANHTGTGLLLTLQPEQKFQKVKGFGGAMTDAAALNILALSPPAQNLLLKSYFSEEGIGYNIIRVPMASCDFSIRTYTYADTPDDFQLHNFSLPEEDTKLKIPLIHRALQLSQRPVSLLASPWTSPTWLKTNGAYNGKGSLKGQPGDIYHQTWARYFVKFLDAYAEHKLQFWAVTAENEPSAGLLSGYPFQCLGFTPEHQRDFIARDLGPTLANSTHHNVRLLILDDQRLLLPHWAKVVLTDPEAAKYVHGIAVHWYLDFLAPAKATLGETHRLFPNTTLFASEACVGSKFWEQSVRLGSWDRGMQYSHSIIENLLYHVVGWTDWNLALNPEGGPNWVRNFVDSPIIVDITKDTFYKQPMFYHLGHFSKFIPEGSQRVGLVASQKNDLDAVALMHPDGSAVVVVLNRSSKDVPLTIKDPAVGFLETISPGYSIHTYLWRRQ

SEQ ID NO: 1597 - DNA, 1608 bp, synthetic construct
  misc_feature 1..1608: note = Variant of B-Glucocerebrosidase
  source 1..1608: mol_type = other DNA
atggagttttcttctcctagtagagaagaatgccccaagccactgagcagggtgagcatcatggctggatccctcacagggctgcttcttttgcaggcagtctcatgggcctctggagccaggccctgtattcccaagtcattcggctactcctcagtggtgtgtgtatgcaatgccacctattgtgacagtgtcgatcctctcactctccctgctctgggtaccttctcccggtatgagagcacaagaagtggaagacgcatggagctctcaatgggccctatacaggctaaccgcactgggacaggtctgctgctgaccctccaacctgaacagaagtttcagaaagtcaagggatttggaggagccatgactgatgcagcagcactcaacatcttggccctgtctccaccagcccagaacctgctgttgaagtcctacttctcagaggaggggattggctacaacatcatccgggttcccatggctagctgtgacttctccattaggacctatacatacgctgacacccccgatgattttcagctccataatttcagtctccctgaagaagacaccaaatggaagatacctctgattcacagagccttgcaactgtcccaaaggccagtgagcctcttggcttctccctggactagtcctacatggctgaagactaatggtgcttacaatgggaagggctccctgaaaggacagccaggtgacatatatcatcagacatgggcccgctactttgtgaaattccttgatgcctatgcagagcacaagctccaattctgggcagtcaccgcagaaaacgagccctcagctgggctgctgtctggctacccctttcagtgcttgggctttactcctgagcatcaacgggacttcattgcccgggatttggggccaacactggccaacagcacccaccacaatgtaagactcctcatgctggatgaccagaggctgctgctccctcattgggccaaggtggtgttgacagacccagaagctgccaaatatgttcatggcatcgctgtccactggtacctggattttttggcccctgccaaggctactctgggagagacccacagactcttccccaataccatgctgtttgcatcagaagcctgcgtggggagcaaattctgggagcagtctgttaggctgggttcctgggatcggggcatgcaatattcccatagtataatagagaacctcctctaccacgtggtaggatggacagactggaatctggctttgaacccagaaggaggccccaattgggtgcgcaactttgttgacagccccatcattgtggatatcacaaaggacaccttctacaaacagcctatgttctatcatctggggcactttagcaagttcattccagagggttcccagagagtaggcttggttgcctcacagaagaatgatctggatgctgtggcactcatgcatcctgacgggagtgcagtggtggtagtactgaacaggtctagcaaagatgttcccttgactatcaaagacccagctgtgggctttctggaaaccatttcccctggatactctatccacacctatctctggagaagacag

SEQ ID NO: 1598 - protein, 536 aa, synthetic construct
  REGION 1..536: note = Variant of B-Glucocerebrosidase
MEFSSPSREECPKPLSRVSIMAGSLTGLLLLQAVSWASGARPCIPKSFGYSSVVCVCNATYCDSVDPLTLPALGTFSRYESTRSGRRMELSMGPIQANRTGTGLLLTLQPEQKFQKVKGFGGAMTDAAALNILALSPPAQNLLLKSYFSEEGIGYNIIRVPMASCDFSIRTYTYADTPDDFQLHNFSLPEEDTKWKIPLIHRALQLSQRPVSLLASPWTSPTWLKTNGAYNGKGSLKGQPGDIYHQTWARYFVKFLDAYAEHKLQFWAVTAENEPSAGLLSGYPFQCLGFTPEHQRDFIARDLGPTLANSTHHNVRLLMLDDQRLLLPHWAKVVLTDPEAAKYVHGIAVHWYLDFLAPAKATLGETHRLFPNTMLFASEACVGSKFWEQSVRLGSWDRGMQYSHSIIENLLYHVVGWTDWNLALNPEGGPNWVRNFVDSPIIVDITKDTFYKQPMFYHLGHFSKFIPEGSQRVGLVASQKNDLDAVALMHPDGSAVVVVLNRSSKDVPLTIKDPAVGFLETISPGYSIHTYLWRRQ

SEQ ID NO: 1599 - DNA, 1608 bp, synthetic construct
  misc_feature 1..1608: note = Variant of B-Glucocerebrosidase
  source 1..1608: mol_type = other DNA
atggagttttcttctcctagtagagaagaatgccccaagccactgagcagggtgagcatcatggctggatccctcacagggctgcttcttttgcaggcagtctcatgggcctctggagccaggccctgtattcccaagtcattcggctactcctcagtggtgtgtgtatgcaatgccacctattgtgacagttttgatcctccaactttccctgctctgggtaccttctcccggtatgagagcacaagaagtggaagacgcatggagctctcaatgggccctatacaggctaaccacactgggacaggtctgctgctgaccctccaacctgaacagaagtttcagaaagtcaagggatttggaggagccatgactgatgcagcagcactcaacatcttggccctgtctccaccagcccagaacctgctgttgaagtcctacttctcagaggaggggattggctacaacatcatccgggttcccatggctagctgtgacttctccattaggacctatacatacgctgacacccccgatgattttcagctccataatttcagtctccctgaagaagacaccaaatggaagatacctctgattcacagagccttgcaactggcacaaaggccagtgagcctcttcgcttctccctggactagtcctacatggctgaagactaatggtgcttacaatgggaagggctccctgaaaggacagccaggtgacatatatcatcagacatgggcccgctactttgtgaaattccttgatgcctatgcagagcacgggctccaattctgggcagtcaccgcagaaaacgagccctcagctgggctgctgtctggctacccctttcagtgcttgggctttactcctgagcatcaacgggacttcattgcccgggatttggggccaacactggccaacagcacccaccacaatgtaagactcctcatgctggatgaccagaggctgctgctccctcattgggccaaggtggtgttgacagacccagaagctgccaaatatgttcatggcatcgctgtccactggtacctggattttttggcccctgccaaggctactctgggagagacccacagactcttccccaataccatgctgtttgcatcagaagcctgcgtggggagcaaattctgggagcagtctgttaggctgggttcctgggatcggggcatgcaatattcccatagtataatagagaacctcctctaccacgtggtaggatggacagactggaatctggctttgaacccagaaggaggccccaattgggtgcgcaactttgttgacagccccatcattgtggatatcacaaaggacaccttctacaaacagcctatgttctatcatctggggcactttagcaagttcattccagagggttcccagagagtaggcttggttgcctcacagaagaatgatctggatgctgtggcactcatgcatcctgacgggagtgcagtggtggtagtactgaacaggtctagcaaagatgttcccttgactatcaaagacccagctgtgggctttctggaaaccatttcccctggatactctatccacacctatctctggagaagacag

SEQ ID NO: 1600 - protein, 536 aa, synthetic construct
  REGION 1..536: note = Variant of B-Glucocerebrosidase
MEFSSPSREECPKPLSRVSIMAGSLTGLLLLQAVSWASGARPCIPKSFGYSSVVCVCNATYCDSFDPPTFPALGTFSRYESTRSGRRMELSMGPIQANHTGTGLLLTLQPEQKFQKVKGFGGAMTDAAALNILALSPPAQNLLLKSYFSEEGIGYNIIRVPMASCDFSIRTYTYADTPDDFQLHNFSLPEEDTKWKIPLIHRALQLAQRPVSLFASPWTSPTWLKTNGAYNGKGSLKGQPGDIYHQTWARYFVKFLDAYAEHGLQFWAVTAENEPSAGLLSGYPFQCLGFTPEHQRDFIARDLGPTLANSTHHNVRLLMLDDQRLLLPHWAKVVLTDPEAAKYVHGIAVHWYLDFLAPAKATLGETHRLFPNTMLFASEACVGSKFWEQSVRLGSWDRGMQYSHSIIENLLYHVVGWTDWNLALNPEGGPNWVRNFVDSPIIVDITKDTFYKQPMFYHLGHFSKFIPEGSQRVGLVASQKNDLDAVALMHPDGSAVVVVLNRSSKDVPLTIKDPAVGFLETISPGYSIHTYLWRRQ

SEQ ID NO: 1601 - DNA, 1608 bp, synthetic construct
  misc_feature 1..1608: note = Variant of B-Glucocerebrosidase
  source 1..1608: mol_type = other DNA
atggagttttcttctcctagtagagaagaatgccccaagccactgagcagggtgagcatcatggctggatccctcacagggctgcttcttttgcaggcagtctcatgggcctctggagccaggccctgtattcccaagtcattcggctactcctcagtggtgtgtgtatgcaatgccacctattgtgacagttttgatcctccaactttccctgctctgggtaccttctcccggtatgagagcacaagaagtggaagacgcatggagctctcaatgggccctatacaggctaaccacactgggacaggtctgctgctgaccctccaacctgaacagaagtttcagaaagtcaagggatttggaggagccatgactgatgcagcagcactcaacatcttggccctgtctccaccagcccagaacctgctgttgaagtcctacttctcagaggaggggattggctacaacatcatccgggttcccatggctagctgtgacttctccattaggacctatacatacgctgacacccccgatgattttcagctccataatttcagtctccctgaagaagacaccaaatggaagatacctctgattcacagagccttgcaactgtcccaaaggccagtgagcctcttggcttctccctggactagtcctacatggctgaagactaatggtgcttacaatgggaagggctccctgaaaggacagccaggtgacatatatcatcagacatgggcccgctactttgtgaaattccttgatgcctatgcagagcacaagctccaattctgggcagtcaccgcagaaaacgagccctcagctgggctgctgtctggctacccctttcagtgcttgggctttactcctgagcatcaacgggacttcattgcccgggatttggggccaacactggccaacagcacccaccacaatgtaagactcctcatgctggatgaccagaggctgctgctccctcattgggccaaggtggtgttgacagacccagaagctgccaaatatgttcatggcatcgctgtccactggtacctggattttttggcccctgccaaggctactctgggagagacccacagactcttccccaataccacactgtttgcatcagaagcctgcgtggggagcaaattctgggagcagtctgttaggctgggttcctgggatcggggcatgcaatattcccatagtataatagagaacctcctctaccacgtggtaggatggacagactggaatctggctttgaacccagaaggaggccccaattgggtgcgcaactttgttgacagccccatcattgtggatatcacaaaggacaccttctacaaacagcctatgttctatcatctggggcactttagcaagttcattccagagggttcccagagagtaggcttggttgcctcacagaagaatgatctggatgctgtggcactcatgcatcctgacgggagtgcagtggtggtagtactgaacaggtctagcaaagatgttcccttgactatcaaagacccagctgtgggctttctggaaaccatttcccctggatactctatccacacctatctctggagaagacag

SEQ ID NO: 1602 - protein, 536 aa, synthetic construct
  REGION 1..536: note = Variant of B-Glucocerebrosidase
MEFSSPSREECPKPLSRVSIMAGSLTGLLLLQAVSWASGARPCIPKSFGYSSVVCVCNATYCDSFDPPTFPALGTFSRYESTRSGRRMELSMGPIQANHTGTGLLLTLQPEQKFQKVKGFGGAMTDAAALNILALSPPAQNLLLKSYFSEEGIGYNIIRVPMASCDFSIRTYTYADTPDDFQLHNFSLPEEDTKWKIPLIHRALQLSQRPVSLLASPWTSPTWLKTNGAYNGKGSLKGQPGDIYHQTWARYFVKFLDAYAEHKLQFWAVTAENEPSAGLLSGYPFQCLGFTPEHQRDFIARDLGPTLANSTHHNVRLLMLDDQRLLLPHWAKVVLTDPEAAKYVHGIAVHWYLDFLAPAKATLGETHRLFPNTTLFASEACVGSKFWEQSVRLGSWDRGMQYSHSIIENLLYHVVGWTDWNLALNPEGGPNWVRNFVDSPIIVDITKDTFYKQPMFYHLGHFSKFIPEGSQRVGLVASQKNDLDAVALMHPDGSAVVVVLNRSSKDVPLTIKDPAVGFLETISPGYSIHTYLWRRQ

SEQ ID NO: 1603 - DNA, 1608 bp, synthetic construct
  misc_feature 1..1608: note = Variant of B-Glucocerebrosidase
  source 1..1608: mol_type = other DNA
atggagttttcttctcctagtagagaagaatgccccaagccactgagcagggtgagcatcatggctggatccctcacagggctgcttcttttgcaggcagtctcatgggcctctggagccaggccctgtattcccaagtcattcggctactcctcagtggtgtgtgtatgcaatgccacctattgtgacagtgtcgatcctctcactctccctgctctgggtaccttctcccggtatgagagcacaagaagtggaagacgcatggagctctcaatgggccctatacaggctaaccgcactgggacaggtctgctgctgaccctccaacctgaacagaagtttcagaaagtcaagggatttggaggagccatgactgatgcagcagcactcaacatcttggccctgtctccaccagcccagaacctgctgttgaagtcctacttctcagaggaggggattgagtacaacatcatccgggttcccatggctagctgtgacttctccattaggacctatacatacgctgacacccccgatgattttcagctccataatttcagtctccctgaagaagacaccaaatggaagatacctctgattcacagagccttgcaactggcacaaaggccagtgagcctcttcgcttctccctggactagtcctacatggctgaagactaatggtgctgttaatgggaagggctccctgaaaggacagccaggtgacatatatcatcagacatgggcccgctactttgtgaaattccttgatgcctatgcagagcacaagctccaattctgggcagtcaccgcagaaaacgagccctcagctgggctgctgtctggctacccctttcagtgcttgggctttactcctgagcatcaacgggacttcattgcccgggatttggggccaacactggccaacagcacccaccacaatgtaagactcctcatgctggatgaccagaggcttctgctccctcattgggccaaggtggtgttgacagacccagaagctgccaaatatgttcatggcatcgctgtccactggtacctggattttttggcccctgccaaggctactctgggagagacccacagactcttccccaataccatgctgtttgcatcagaagcctgcgtggggagcaaattctgggagcagtctgttaggctgggttcctgggatcggggcatgcaatattcccatagtataatagagaacctcctctaccacgtggtaggatggacagactggaatctggctttgaacccagaaggaggccccaattgggtgcgcaactttgttgacagccccatcattgtggatatcacaaaggacaccttctacaaacagcctatgttctatcatctggggcactttagcaagttcattccagagggttcccagagagtaggcttggttgcctcacagaagaatgatctggatgctgtggcactcatgcatcctgacgggagtgcagtggtggtagtactgaacaggtctagcaaagatgttcccttgactatcaaagacccagctgtgggctttctggaaaccatttcccctggatactctatccacacctatctctggagaagacag

SEQ ID NO: 1604 - protein, 536 aa, synthetic construct
  REGION 1..536: note = Variant of B-Glucocerebrosidase
MEFSSPSREECPKPLSRVSIMAGSLTGLLLLQAVSWASGARPCIPKSFGYSSVVCVCNATYCDSVDPLTLPALGTFSRYESTRSGRRMELSMGPIQANRTGTGLLLTLQPEQKFQKVKGFGGAMTDAAALNILALSPPAQNLLLKSYFSEEGIEYNIIRVPMASCDFSIRTYTYADTPDDFQLHNFSLPEEDTKWKIPLIHRALQLAQRPVSLFASPWTSPTWLKTNGAVNGKGSLKGQPGDIYHQTWARYFVKFLDAYAEHKLQFWAVTAENEPSAGLLSGYPFQCLGFTPEHQRDFIARDLGPTLANSTHHNVRLLMLDDQRLLLPHWAKVVLTDPEAAKYVHGIAVHWYLDFLAPAKATLGETHRLFPNTMLFASEACVGSKFWEQSVRLGSWDRGMQYSHSIIENLLYHVVGWTDWNLALNPEGGPNWVRNFVDSPIIVDITKDTFYKQPMFYHLGHFSKFIPEGSQRVGLVASQKNDLDAVALMHPDGSAVVVVLNRSSKDVPLTIKDPAVGFLETISPGYSIHTYLWRRQ

SEQ ID NO: 1605 - DNA, 1608 bp, synthetic construct
  misc_feature 1..1608: note = Variant of B-Glucocerebrosidase
  source 1..1608: mol_type = other DNA
atggagttttcttctcctagtagagaagaatgccccaagccactgagcagggtgagcatcatggctggatccctcacagggctgcttcttttgcaggcagtctcatgggcctctggagccaggccctgtattcccaagtcattcggctactcctcagtggtgtgtgtatgcaatgccacctattgtgacagttttgatcctccaactttccctgctctgggtaccttctcccggtatgagagcacaagaagtggaagacgcatggagctctcaatgggccctatacaggctaaccacactgggacaggtctgctgctgaccctccaacctgaacagaagtttcagaaagtcaagggatttggaggagccatgactgatgcagcagcactcaacatcttggccctgtctccaccagcccagaacctgctgttgaagtcctacttctcagaggaggggattggctacaacatcatccgggttcccatggctagctgtgacttctccattaggacctatacatacgctgacacccccgatgattttcagctccataatttcagtctccctgaagaagacaccaaactgaagatacctctgattcacagagccttgcaactgtcccaaaggccagtgagcctcttcgcttctccctggactagtcctacatggctgaagactaatggtgcttacaatgggaagggctccctgaaaggacagccaggtgacatatatcatcagacatgggcccgctactttgtgaaattccttgatgcctatgcagagcacaagctccaattctgggcagtcaccgcagaaaacgagccctcagctgggctgctgtctggctacccctttcagtgcttgggctttactcctgagcatcaacgggacttcattgcccgggatttggggccaacactggccaacagcacccaccacaatgtaagactcctcattctggatgaccagaggctgctgctccctcattgggccaaggtggtgttgacagacccagaagctgccaaatatgttcatggcatcgctgtccactggtacctggattttttggcccctgccaaggctactctgggagagacccacagactcttccccaataccacactgtttgcatcagaagcctgcgtggggagcaaattctgggagcagtctgttaggctgggttcctgggatcggggcatgcaatattcccatagtataatagagaacctcctctaccacgtggtaggatggacagactggaatctggctttgaacccagaaggaggccccaattgggtgcgcaactttgttgacagccccatcattgtggatatcacaaaggacaccttctacaaacagcctatgttctatcatctggggcactttagcaagttcattccagagggttcccagagagtaggcttggttgcctcacagaagaatgatctggatgctgtggcactcatgcatcctgacgggagtgcagtggtggtagtactgaacaggtctagcaaagatgttcccttgactatcaaagacccagctgtgggctttctggaaaccatttcccctggatactctatccacacctatctctggagaagacag

SEQ ID NO: 1606 - protein, 536 aa, synthetic construct
  REGION 1..536: note = Variant of B-Glucocerebrosidase
MEFSSPSREECPKPLSRVSIMAGSLTGLLLLQAVSWASGARPCIPKSFGYSSVVCVCNATYCDSFDPPTFPALGTFSRYESTRSGRRMELSMGPIQANHTGTGLLLTLQPEQKFQKVKGFGGAMTDAAALNILALSPPAQNLLLKSYFSEEGIGYNIIRVPMASCDFSIRTYTYADTPDDFQLHNFSLPEEDTKLKIPLIHRALQLSQRPVSLFASPWTSPTWLKTNGAYNGKGSLKGQPGDIYHQTWARYFVKFLDAYAEHKLQFWAVTAENEPSAGLLSGYPFQCLGFTPEHQRDFIARDLGPTLANSTHHNVRLLILDDQRLLLPHWAKVVLTDPEAAKYVHGIAVHWYLDFLAPAKATLGETHRLFPNTTLFASEACVGSKFWEQSVRLGSWDRGMQYSHSIIENLLYHVVGWTDWNLALNPEGGPNWVRNFVDSPIIVDITKDTFYKQPMFYHLGHFSKFIPEGSQRVGLVASQKNDLDAVALMHPDGSAVVVVLNRSSKDVPLTIKDPAVGFLETISPGYSIHTYLWRRQ

SEQ ID NO: 1607 - DNA, 1608 bp, synthetic construct
  misc_feature 1..1608: note = Variant of B-Glucocerebrosidase
  source 1..1608: mol_type = other DNA
atggagttttcttctcctagtagagaagaatgccccaagccactgagcagggtgagcatcatggctggatccctcacagggctgcttcttttgcaggcagtctcatgggcctctggagccaggccctgtattcccaagtcattcggctactcctcagtggtgtgtgtatgcaatgccacctattgtgacagttttgatcctccaactttccctgctctgggtaccttctcccggtatgagagcacaagaagtggaagacgcatggagctctcaatgggccctatacaggctaaccacactgggacaggtctgctgctgaccctccaacctgaacagaagtttcagaaagtcaagggatttggaggagccatgactgatgcagcagcactcaacatcttggccctgtctccaccagcccagaacctgctgttgaagtcctacttctcagaggaggggattggctacaacatcatccgggttcccatggctagctgtgacttctccattaggacctatacatacgctgacacccccgatgattttcagctccataatttcagtctccctgaagaagacaccaaactgaagatacctctgattcacagagccttgcaactgtcccaaaggccagtgagcctcttcgcttctccctggactagtcctacatggctgaagactaatggtgcttacaatgggaagggctccctgaaaggacagccaggtgacatatatcatcagacatgggcccgctactttgtgaaattccttgatgcctatgcagagcacaagctccaattctgggcagtcaccgcagaaaacgagccctcagctgggctgctgtctggctacccctttcagtgcttgggctttactcctgagcatcaacgggacttcattgcccgggatttggggccaacactggccaacagcacccaccacaatgtaagactcctcatgctggatgaccagaggctgctgctccctcattgggccaaggtggtgttgacagacccagaagctgccaaatatgttcatggcatcgctgtccactggtacctggattttttggcccctgccaaggctactctgggagagacccacagactcttccccaataccacactgtttgcatcagaagcctgcgtggggagcaaattctgggagcagtctgttaggctgggttcctgggatcggggcatgcaatattcccatagtataatagagaacctcctctaccacgtggtaggatggacagactggaatctggctttgaacccagaaggaggccccaattgggtgcgcaactttgttgacagccccatcattgtggatatcacaaaggacaccttctacaaacagcctatgttctatcatctggggcactttagcaagttcattccagagggttcccagagagtaggcttggttgcctcacagaagaatgatctggatgctgtggcactcatgcatcctgacgggagtgcagtggtggtagtactgaacaggtctagcaaagatgttcccttgactatcaaagacccagctgtgggctttctggaaaccatttcccctggatactctatccacacctatctctggagaagacag

SEQ ID NO: 1608 - protein, 536 aa, synthetic construct
  REGION 1..536: note = Variant of B-Glucocerebrosidase
MEFSSPSREECPKPLSRVSIMAGSLTGLLLLQAVSWASGARPCIPKSFGYSSVVCVCNATYCDSFDPPTFPALGTFSRYESTRSGRRMELSMGPIQANHTGTGLLLTLQPEQKFQKVKGFGGAMTDAAALNILALSPPAQNLLLKSYFSEEGIGYNIIRVPMASCDFSIRTYTYADTPDDFQLHNFSLPEEDTKLKIPLIHRALQLSQRPVSLFASPWTSPTWLKTNGAYNGKGSLKGQPGDIYHQTWARYFVKFLDAYAEHKLQFWAVTAENEPSAGLLSGYPFQCLGFTPEHQRDFIARDLGPTLANSTHHNVRLLMLDDQRLLLPHWAKVVLTDPEAAKYVHGIAVHWYLDFLAPAKATLGETHRLFPNTTLFASEACVGSKFWEQSVRLGSWDRGMQYSHSIIENLLYHVVGWTDWNLALNPEGGPNWVRNFVDSPIIVDITKDTFYKQPMFYHLGHFSKFIPEGSQRVGLVASQKNDLDAVALMHPDGSAVVVVLNRSSKDVPLTIKDPAVGFLETISPGYSIHTYLWRRQ

SEQ ID NO: 1609 - DNA, 1608 bp, synthetic construct
  misc_feature 1..1608: note = Variant of B-Glucocerebrosidase
  source 1..1608: mol_type = other DNA
atggagttttcttctcctagtagagaagaatgccccaagccactgagcagggtgagcatcatggctggatccctcacagggctgcttcttttgcaggcagtctcatgggcctctggagccaggccctgtattcccaagtcattcggctactcctcagtggtgtgtgtatgcaatgccacctattgtgacagttttgatcctccaactttccctgctctgggtaccttctcccggtatgagagcacaagaagtggaagacgcatggagctctcaatgggccctatacaggctaaccacactgggacaggtctgctgctgaccctccaacctgaacagaagtttcagaaagtcaagggatttggaggagccatgactgatgcagcagcactcaacatcttggccctgtctccaccagcccagaacctgctgttgaagtcctacttctcagaggaggggattgagtacaacatcatccgggttcccatggctagctgtgacttctccattaggacctatacatacgctgacacccccgatgattttcagctccataatttcagtctccctgaagaagacaccaaactgaagatacctctgattcacagagccttgcaactgtcccaaaggccagtgagcctcttggcttctccctggactagtcctacatggctgaagactaatggtgcttacaatgggaagggctccctgaaaggacagccaggtgacatatatcatcagacatgggcccgctactttgtgaaattccttgatgcctatgcagagcacaagctccaattctgggcagtcaccgcagaaaacgagccctcagctgggctgctgtctggctacccctttcagtgcttgggctttactcctgagcatcaacgggacttcattgcccgggatttggggccaacactggccaacagcacccaccacaatgtaagactcctcatgctggatgaccagaggctgctgctccctcattgggccaaggtggtgttgacagacccagaagctgccaaatatgttcatggcatcgctgtccactggtacctggattttttggcccctgccaaggctactctgggagagacccacagactcttccccaataccacactgtttgcatcagaagcctgcgtggggagcaaattctgggagcagtctgttaggctgggttcctgggatcggggcatgcaatattcccatagtataatagagaacctcctctaccacgtggtaggatggacagactggaatctggctttgaacccagaaggaggccccaattgggtgcgcaactttgttgacagccccatcattgtggatatcacaaaggacaccttctacaaacagcctatgttctatcatctggggcactttagcaagttcattccagagggttcccagagagtaggcttggttgcctcacagaagaatgatctggatgctgtggcactcctgcatcctgacgggagtgcagtggtggtagtactgaacaggtctagcaaagatgttcccttgactatcaaagacccagctgtgggctttctggaaaccatttcccctggatactctatccacacctatctctggagaagacag

SEQ ID NO: 1610 - protein, 536 aa, synthetic construct
  REGION 1..536: note = Variant of B-Glucocerebrosidase
MEFSSPSREECPKPLSRVSIMAGSLTGLLLLQAVSWASGARPCIPKSFGYSSVVCVCNATYCDSFDPPTFPALGTFSRYESTRSGRRMELSMGPIQANHTGTGLLLTLQPEQKFQKVKGFGGAMTDAAALNILALSPPAQNLLLKSYFSEEGIEYNIIRVPMASCDFSIRTYTYADTPDDFQLHNFSLPEEDTKLKIPLIHRALQLSQRPVSLLASPWTSPTWLKTNGAYNGKGSLKGQPGDIYHQTWARYFVKFLDAYAEHKLQFWAVTAENEPSAGLLSGYPFQCLGFTPEHQRDFIARDLGPTLANSTHHNVRLLMLDDQRLLLPHWAKVVLTDPEAAKYVHGIAVHWYLDFLAPAKATLGETHRLFPNTTLFASEACVGSKFWEQSVRLGSWDRGMQYSHSIIENLLYHVVGWTDWNLALNPEGGPNWVRNFVDSPIIVDITKDTFYKQPMFYHLGHFSKFIPEGSQRVGLVASQKNDLDAVALLHPDGSAVVVVLNRSSKDVPLTIKDPAVGFLETISPGYSIHTYLWRRQ

SEQ ID NO: 1611 - DNA, 1608 bp, synthetic construct
  misc_feature 1..1608: note = Variant of B-Glucocerebrosidase
  source 1..1608: mol_type = other DNA
atggagttttcttctcctagtagagaagaatgccccaagccactgagcagggtgagcatcatggctggatccctcacagggctgcttcttttgcaggcagtctcatgggcctctggagccaggccctgtattcccaagtcattcggctactcctcagtggtgtgtgtatgcaatgccacctattgtgacagttttgatcctccaactttccctgctctgggtaccttctcccggtatgagagcacaagaagtggaagacgcatggagctctcaatgggccctatacaggctaaccacactgggacaggtctgctgctgaccctccaacctgaacagaagtttcagaaagtcaagggatttggaggagccatgactgatgcagcagcactcaacatcttggccctgtctccaccagcccagaacctgctgttgaagtcctacttctcagaggaggggattggctacaacatcatccgggttcccatggctagctgtgacttctccattaggacctatacatacgctgacacccccgatgattttcagctccataatttcagtctccctgaagaagacaccaaactgaagatacctctgattcacagagccttgcaactgtcccaaaggccagtgagcctcttggcttctccctggactagtcctacatggctgaagactaatggtgcttacaatgggaagggctccctgaaaggacagccaggtgacatatatcatcagacatgggcccgctactttgtgaaattccttgatgcctatgcagagcacgggctccaattctgggcagtcaccgcagaaaacgagccctcagctgggctgctgtctggctacccctttcagtgcttgggctttactcctgagcatcaacgggacttcattgcccgggatttggggccaacactggccaacagcacccaccacaatgtaagactcctcatgctggatgaccagaggctgctgctccctcattgggccaaggtggtgttgacagacccagaagctgccaaatatgttcatggcatcgctgtccactggtacctggattttttggcccctgccaaggctactctgggagagacccacagactcttccccaataccatgctgtttgcatcagaagcctgcgtggggagcaaattctgggagcagtctgttaggctgggttcctgggatcggggcatgcaatattcccatagtataatagagaacctcctctaccacgtggtaggatggacagactggaatctggctttgaacccagaaggaggccccaattgggtgcgcaactttgttgacagccccatcattgtggatatcacaaaggacaccttctacaaacagcctatgttctatcatctggggcactttagcaagttcattccagagggttcccagagagtaggcttggttgcctcacagaagaatgatctggatgctgtggcactcatgcatcctgacgggagtgcagtggtggtagtactgaacaggtctagcaaagatgttcccttgactatcaaagacccagctgtgggctttctggaaaccatttcccctggatactctatccacacctatctctggagaagacag

SEQ ID NO: 1612 - protein, 536 aa, synthetic construct
  REGION 1..536: note = Variant of B-Glucocerebrosidase
MEFSSPSREECPKPLSRVSIMAGSLTGLLLLQAVSWASGARPCIPKSFGYSSVVCVCNATYCDSFDPPTFPALGTFSRYESTRSGRRMELSMGPIQANHTGTGLLLTLQPEQKFQKVKGFGGAMTDAAALNILALSPPAQNLLLKSYFSEEGIGYNIIRVPMASCDFSIRTYTYADTPDDFQLHNFSLPEEDTKLKIPLIHRALQLSQRPVSLLASPWTSPTWLKTNGAYNGKGSLKGQPGDIYHQTWARYFVKFLDAYAEHGLQFWAVTAENEPSAGLLSGYPFQCLGFTPEHQRDFIARDLGPTLANSTHHNVRLLMLDDQRLLLPHWAKVVLTDPEAAKYVHGIAVHWYLDFLAPAKATLGETHRLFPNTMLFASEACVGSKFWEQSVRLGSWDRGMQYSHSIIENLLYHVVGWTDWNLALNPEGGPNWVRNFVDSPIIVDITKDTFYKQPMFYHLGHFSKFIPEGSQRVGLVASQKNDLDAVALMHPDGSAVVVVLNRSSKDVPLTIKDPAVGFLETISPGYSIHTYLWRRQ

SEQ ID NO: 1613 - DNA, 1608 bp, synthetic construct
  misc_feature 1..1608: note = Variant of B-Glucocerebrosidase
  source 1..1608: mol_type = other DNA
atggagttttcttctcctagtagagaagaatgccccaagccactgagcagggtgagcatcatggctggatccctcacagggctgcttcttttgcaggcagtctcatgggcctctggagccaggccctgtattcccaagtcattcggctactcctcagtggtgtgtgtatgcaatgccacctattgtgacagttttgatcctccaactttccctgctctgggtaccttctcccggtatgagagcacaagaagtggaagacgcatggagctctcaatgggccctatacaggctaaccacactgggacaggtctgctgctgaccctccaacctgaacagaagtttcagaaagtcaagggatttggaggagccatgactgatgcagcagcactcaacatcttggccctgtctccaccagcccagaacctgctgttgaagtcctacttctcagaggaggggattggctacaacatcatccgggttcccatggctagctgtgacttctccattaggacctatacatacgctgacacccccgatgattttcagctccataatttcagtctccctgaagaagacaccaaactgaagatacctctgattcacagagccttgcaactgtcccaaaggccagtgagcctcttggcttctccctggactagtcctacatggctgaagactaatggtgcttacaatgggaagggctccctgaaaggacagccaggtgacatatatcatcagacatgggcccgctactttgtgaaattccttgatgcctatgcagagcacaagctccaattctgggcagtcaccgcagaaaacgagccctcagctgggctgctgtctggctacccctttcagtgcttgggctttactcctgagcatcaacgggacttcattgcccgggatttggggccaacactggccaacagcacccaccacaatgtaagactcctcatgctggatgaccagaggctgctgctccctcattgggccaaggtggtgttgacagacccagaagctgccaaatatgttcatggcatcgctgtccactggtacctggattttttggcccctgccaaggctactctgggagagacccacagactcttccccaataccatgctgtttgcatcagaagcctgcgtggggagcaaattctgggagcagtctgttaggctgggttcctgggatcggggcatgcaatattcccatagtataatagagaacctcctctaccacgtggtaggatggacagactggaatctggctttgaacccagaaggaggccccaattgggtgcgcaactttgttgacagccccatcattgtggatatcacaaaggacaccttctacaaacagcctatgttctatcatctggggcactttagcaagttcattccagagggttccactagagtaggcttggttgcctcacagaagaatgatctggatgctgtggcactcatgcatcctgacgggagtgcagtggtggtagtactgaacaggtctagcaaagatgttcccttgactatcaaagacccagctgtgggctttctggaaaccatttcccctggatactctatccacacctatctctggagaagacag

SEQ ID NO: 1614 - protein, 536 aa, synthetic construct
  REGION 1..536: note = Variant of B-Glucocerebrosidase
MEFSSPSREECPKPLSRVSIMAGSLTGLLLLQAVSWASGARPCIPKSFGYSSVVCVCNATYCDSFDPPTFPALGTFSRYESTRSGRRMELSMGPIQANHTGTGLLLTLQPEQKFQKVKGFGGAMTDAAALNILALSPPAQNLLLKSYFSEEGIGYNIIRVPMASCDFSIRTYTYADTPDDFQLHNFSLPEEDTKLKIPLIHRALQLSQRPVSLLASPWTSPTWLKTNGAYNGKGSLKGQPGDIYHQTWARYFVKFLDAYAEHKLQFWAVTAENEPSAGLLSGYPFQCLGFTPEHQRDFIARDLGPTLANSTHHNVRLLMLDDQRLLLPHWAKVVLTDPEAAKYVHGIAVHWYLDFLAPAKATLGETHRLFPNTMLFASEACVGSKFWEQSVRLGSWDRGMQYSHSIIENLLYHVVGWTDWNLALNPEGGPNWVRNFVDSPIIVDITKDTFYKQPMFYHLGHFSKFIPEGSTRVGLVASQKNDLDAVALMHPDGSAVVVVLNRSSKDVPLTIKDPAVGFLETISPGYSIHTYLWRRQ

SEQ ID NO: 1615 - DNA, 1608 bp, synthetic construct
  misc_feature 1..1608: note = Variant of B-Glucocerebrosidase
  source 1..1608: mol_type = other DNA
atggagttttcttctcctagtagagaagaatgccccaagccactgagcagggtgagcatcatggctggatccctcacagggctgcttcttttgcaggcagtctcatgggcctctggagccaggccctgtattcccaagtcattcggctactcctcagtggtgtgtgtatgcaatgccacctattgtgacagttttgatcctccaactttccctgctctgggtaccttctcccggtatgagagcacaagaagtggaagacgcatggagctctcaatgggccctatacaggctaaccacactgggacaggtctgctgctgaccctccaacctgaacagaagtttcagaaagtcaagggatttggaggagccatgactgatgcagcagcactcaacatcttggccctgtctccaccagcccagaacctgctgttgaagtcctacttctcagaggaggggattggctacaacatcatccgggttcccatggctagctgtgacttctccattaggacctatacatacgctgacacccccgatgattttcagctccataatttcagtctccctgaagaagacaccaaactgaagatacctctgattcacagagccttgcaactgtcccaaaggccagtgagcctcttggcttctccctggactagtcctacatggctgaagactaatggtgcttacaatgggaagggctccctgaaaggacagccaggtgacatatatcatcagacatgggcccgctactttgtgaaattccttgatgcctatgcagagcacaagctccaattctgggcagtcaccgcagaaaacgagccctcagctgggctgctgtctggctacccctttcagtgcttgggctttactcctgagcatcaacgggacttcattgcccgggatttggggccaacactggccaacagcacccaccacaatgtaagactcctcatgctggatgaccagaggctgctgctccctcattgggccaaggtggtgttgacagacccagaagctgccaaatatgttcatggcatcgctgtccactggtacctggattttttggcccctgccaaggctactctgggagagacccacagactcttccccaataccacactgtttgcatcagaagcctgcgtggggagcaaattctgggagcagtctgttaggctgggttcctgggatcggggcatgcaatattcccatagtataatagagaacctcctctaccacgtggtaggatggacagactggaatctggctttgaacccagaaggaggccccaattgggtgcgcaactttgttgacagccccatcattgtggatatcacaaaggacaccttctacaaacagcctatgttctatcatctggggcactttagcaagttcattccagagggttcccagagagtaggcttggttgcctcacagaagaatgatctggatgctgtggcactcatgcatcctgacgggagtgcagtggtggtagtactgaacaggtctagcaaagatgttcccttgactatcaaagacccagctgtgggctttctggaaaccatttcccctggatactctatccacacctatctctggagaagacag

SEQ ID NO: 1616 - protein, 536 aa, synthetic construct
  REGION 1..536: note = Variant of B-Glucocerebrosidase
MEFSSPSREECPKPLSRVSIMAGSLTGLLLLQAVSWASGARPCIPKSFGYSSVVCVCNATYCDSFDPPTFPALGTFSRYESTRSGRRMELSMGPIQANHTGTGLLLTLQPEQKFQKVKGFGGAMTDAAALNILALSPPAQNLLLKSYFSEEGIGYNIIRVPMASCDFSIRTYTYADTPDDFQLHNFSLPEEDTKLKIPLIHRALQLSQRPVSLLASPWTSPTWLKTNGAYNGKGSLKGQPGDIYHQTWARYFVKFLDAYAEHKLQFWAVTAENEPSAGLLSGYPFQCLGFTPEHQRDFIARDLGPTLANSTHHNVRLLMLDDQRLLLPHWAKVVLTDPEAAKYVHGIAVHWYLDFLAPAKATLGETHRLFPNTTLFASEACVGSKFWEQSVRLGSWDRGMQYSHSIIENLLYHVVGWTDWNLALNPEGGPNWVRNFVDSPIIVDITKDTFYKQPMFYHLGHFSKFIPEGSQRVGLVASQKNDLDAVALMHPDGSAVVVVLNRSSKDVPLTIKDPAVGFLETISPGYSIHTYLWRRQ

SEQ ID NO: 1617 - DNA, 1608 bp, synthetic construct
  misc_feature 1..1608: note = Variant of B-Glucocerebrosidase
  source 1..1608: mol_type = other DNA
atggagttttcttctcctagtagagaagaatgccccaagccactgagcagggtgagcatcatggctggatccctcacagggctgcttcttttgcaggcagtctcatgggcctctggagccaggccctgtattcccaagtcattcggctactcctcagtggtgtgtgtatgcaatgccacctattgtgacagttttgatcctccaactttccctgctctgggtaccttctcccggtatgagagcacaagaagtggaagacgcatggagctctcaatgggccctatacaggctaaccacactgggacaggtctgctgctgaccctccaacctgaacagaagtttcagaaagtcaagggatttggaggagccatgactgatgcagcagcactcaacatcttggccctgtctccaccagcccagaacctgctgttgaagtcctacttctcagaggaggggattggctacaacatcatccgggttcccatggctagctgtgacttctccattaggacctatacatacgctgacacccccgatgattttcagctccataatttcagtctccctgaagaagacaccaaactgaagatacctctgattcacagagccttgcaactggcacaaaggccagtgagcctcttcgcttctccctggactagtcctacatggctgaagactaatggtgcttacaatgggaagggctccctgaaaggacagccaggtgacatatatcatcagacatgggcccgctactttgtgaaattccttgatgcctatgcagagcacaagctccaattctgggcagtcaccgcagaaaacgagccctcagctgggctgctgtctggctacccctttcagtgcttgggctttactcctgagcatcaacgggacttcattgcccgggatttggggccaacactggccaacagcacccaccacaatgtaagactcctcattctggatgaccagaggctgctgctccctcattgggccaaggtggtgttgacagacccagaagctgccaaatatgttcatggcatcgctgtccactggtacctggattttttggcccctgccaaggctactctgggagagacccacagactcttccccaataccatgctgtttgcatcagaagcctgcgtggggagcaaattctgggagcagtctgttaggctgggttcctgggatcggggcatgcaatattcccatagtataatagagaacctcctctaccacgtggtaggatggacagactggaatctggctttgaacccagaaggaggccccaattgggtgcgcaactttgttgacagccccatcattgtggatatcacaaaggacaccttctacaaacagcctatgttctatcatctggggcactttagcaagttcattccagagggttcccagagagtaggcttggttgcctcacagaagaatgatctggatgctgtggcactcatgcatcctgacgggagtgcagtggtggtagtactgaacaggtctagcaaagatgttcccttgactatcaaagacccagctgtgggctttctggaaaccatttcccctggatactctatccacacctatctctggagaagacag

SEQ ID NO: 1618 - protein, 536 aa, synthetic construct
  REGION 1..536: note = Variant of B-Glucocerebrosidase
MEFSSPSREECPKPLSRVSIMAGSLTGLLLLQAVSWASGARPCIPKSFGYSSVVCVCNATYCDSFDPPTFPALGTFSRYESTRSGRRMELSMGPIQANHTGTGLLLTLQPEQKFQKVKGFGGAMTDAAALNILALSPPAQNLLLKSYFSEEGIGYNIIRVPMASCDFSIRTYTYADTPDDFQLHNFSLPEEDTKLKIPLIHRALQLAQRPVSLFASPWTSPTWLKTNGAYNGKGSLKGQPGDIYHQTWARYFVKFLDAYAEHKLQFWAVTAENEPSAGLLSGYPFQCLGFTPEHQRDFIARDLGPTLANSTHHNVRLLILDDQRLLLPHWAKVVLTDPEAAKYVHGIAVHWYLDFLAPAKATLGETHRLFPNTMLFASEACVGSKFWEQSVRLGSWDRGMQYSHSIIENLLYHVVGWTDWNLALNPEGGPNWVRNFVDSPIIVDITKDTFYKQPMFYHLGHFSKFIPEGSQRVGLVASQKNDLDAVALMHPDGSAVVVVLNRSSKDVPLTIKDPAVGFLETISPGYSIHTYLWRRQ

SEQ ID NO: 1619 - DNA, 1608 bp, synthetic construct
  misc_feature 1..1608: note = Variant of B-Glucocerebrosidase
  source 1..1608: mol_type = other DNA
atggagttttcttctcctagtagagaagaatgccccaagccactgagcagggtgagcatcatggctggatccctcacagggctgcttcttttgcaggcagtctcatgggcctctggagccaggccctgtattcccaagtcattcggctactcctcagtggtgtgtgtatgcaatgccacctattgtgacagttttgatcctccaactttccctgctctgggtaccttctcccggtatgagagcacaagaagtggaagacgcatggagctctcaatgggccctatacaggctaaccacactgggacaggtctgctgctgaccctccaacctgaacagaagtttcagaaagtcaagggatttggaggagccatgactgatgcagcagcactcaacatcttggccctgtctccaccagcccagaacctgctgttgaagtcctacttctcagaggaggggattggctacaacatcatccgggttcccatggctagctgtgacttctccattaggacctatacatacgctgacacccccgatgattttcagctccataatttcagtctccctgaagaagacaccaaactgaagatacctctgattcacagagccttgcaactggcacaaaggccagtgagcctcttcgcttctccctggactagtcctacatggctgaagactaatggtgcttacaatgggaagggctccctgaaaggacagccaggtgacatatatcatcagacatgggcccgctactttgtgaaattccttgatgcctatgcagagcacaagctccaattctgggcagtcaccgcagaaaacgagccctcagctgggctgctgtctggctacccctttcagtgcttgggctttactcctgagcatcaacgggacttcattgcccgggatttggggccaacactggccaacagcacccaccacaatgtaagactcctcatgctggatgaccagaggctgctgctccctcattgggccaaggtggtgttgacagacccagaagctgccaaatatgttcatggcatcgctgtccactggtacctggattttttggcccctgccaaggctactctgggagagacccacagactcttccccaataccacactgtttgcatcagaagcctgcgtggggagcaaattctgggagcagtctgttaggctgggttcctgggatcggggcatgcaatattcccatagtataatagagaacctcctctaccacgtggtaggatggacagactggaatctggctttgaacccagaaggaggccccaattgggtgcgcaactttgttgacagccccatcattgtggatatcacaaaggacaccttctacaaacagcctatgttctatcatctggggcactttagcaagttcattccagagggttcccagagagtaggcttggttgcctcacagaagaatgatctggatgctgtggcactcctgcatcctgacgggagtgcagtggtggtagtactgaacaggtctagcaaagatgttcccttgactatcaaagacccagctgtgggctttctggaaaccatttcccctggatactctatccacacctatctctggagaagacag

SEQ ID NO: 1620 - protein, 536 aa, synthetic construct
  REGION 1..536: note = Variant of B-Glucocerebrosidase
MEFSSPSREECPKPLSRVSIMAGSLTGLLLLQAVSWASGARPCIPKSFGYSSVVCVCNATYCDSFDPPTFPALGTFSRYESTRSGRRMELSMGPIQANHTGTGLLLTLQPEQKFQKVKGFGGAMTDAAALNILALSPPAQNLLLKSYFSEEGIGYNIIRVPMASCDFSIRTYTYADTPDDFQLHNFSLPEEDTKLKIPLIHRALQLAQRPVSLFASPWTSPTWLKTNGAYNGKGSLKGQPGDIYHQTWARYFVKFLDAYAEHKLQFWAVTAENEPSAGLLSGYPFQCLGFTPEHQRDFIARDLGPTLANSTHHNVRLLMLDDQRLLLPHWAKVVLTDPEAAKYVHGIAVHWYLDFLAPAKATLGETHRLFPNTTLFASEACVGSKFWEQSVRLGSWDRGMQYSHSIIENLLYHVVGWTDWNLALNPEGGPNWVRNFVDSPIIVDITKDTFYKQPMFYHLGHFSKFIPEGSQRVGLVASQKNDLDAVALLHPDGSAVVVVLNRSSKDVPLTIKDPAVGFLETISPGYSIHTYLWRRQ

SEQ ID NO: 1621 - DNA, 1608 bp, synthetic construct
  misc_feature 1..1608: note = Variant of B-Glucocerebrosidase
  source 1..1608: mol_type = other DNA
atggagttttcttctcctagtagagaagaatgccccaagccactgagcagggtgagcatcatggctggatccctcacagggctgcttcttttgcaggcagtctcatgggcctctggagccaggccctgtattcccaagtcattcggctactcctcagtggtgtgtgtatgcaatgccacctattgtgacagttttgatcctccaactttccctgctctgggtaccttctcccggtatgagagcacaagaagtggaagacgcatggagctctcaatgggccctatacaggctaaccacactgggacaggtctgctgctgaccctccaacctgaacagaagtttcagaaagtcaagggatttggaggagccatgactgatgcagcagcactcaacatcttggccctgtctccaccagcccagaacctgctgttgaagtcctacttctcagaggaggggattggctacaacatcatccgggttcccatggctagctgtgacttctccattaggacctatacatacgctgacacccccgatgattttcagctccataatttcagtctccctgaagaagacaccaaactgaagatacctctgattcacagagccttgcaactgtcccaaaggccagtgagcctcttggcttctccctggactagtcctacatggctgaagactaatggtgcttacaatgggaagggctccctgaaaggacagccaggtgacatatatcatcagacatgggcccgctactttgtgaaattccttgatgcctatgcagagcacaagctccaattctgggcagtcaccgcagaaaacgagccctcagctgggctgctgtctggctacccctttcagtgcttgggctttactcctgagcatcaacgggacttcattgcccgggatttggggccaacactggccaacagcacccaccacaatgtaagactcctcatgctggatgaccagaggctgctgctccctcattgggccaaggtggtgttgacagacccagaagctgccaaatatgttcatggcatcgctgtccactggtacctggattttttggcccctgccaaggctactctgggagagacccacagactcttccccaataccatgctgtttgcatcagaagcctgcgtggggagcaaattctgggagcagtctgttaggctgggttcctgggatcggggcatgcaatattcccatagtataatagagaacctcctctaccacgtggtaggatggacagactggaatctggctttgaacccagaaggaggccccaattgggtgcgcaactttgttgacagccccatcattgtggatatcacaaaggacaccttctacaaacagcctatgttctatcatctggggcactttagcaagttcattccagagggttcccagagagtaggcttggttgcctcacagaagaatgatctggatgctgtggcactcatgcatcctgacgggagtgcagtggtggtagtactgaacaggtctagcaaagatgttcccttgactatcaaagacccagctgtgggctttctggaaaccatttcccctggatactctatccacacctatctctggagaagacag

SEQ ID NO: 1622 - protein, 536 aa, synthetic construct
  REGION 1..536: note = Variant of B-Glucocerebrosidase
MEFSSPSREECPKPLSRVSIMAGSLTGLLLLQAVSWASGARPCIPKSFGYSSVVCVCNATYCDSFDPPTFPALGTFSRYESTRSGRRMELSMGPIQANHTGTGLLLTLQPEQKFQKVKGFGGAMTDAAALNILALSPPAQNLLLKSYFSEEGIGYNIIRVPMASCDFSIRTYTYADTPDDFQLHNFSLPEEDTKLKIPLIHRALQLSQRPVSLLASPWTSPTWLKTNGAYNGKGSLKGQPGDIYHQTWARYFVKFLDAYAEHKLQFWAVTAENEPSAGLLSGYPFQCLGFTPEHQRDFIARDLGPTLANSTHHNVRLLMLDDQRLLLPHWAKVVLTDPEAAKYVHGIAVHWYLDFLAPAKATLGETHRLFPNTMLFASEACVGSKFWEQSVRLGSWDRGMQYSHSIIENLLYHVVGWTDWNLALNPEGGPNWVRNFVDSPIIVDITKDTFYKQPMFYHLGHFSKFIPEGSQRVGLVASQKNDLDAVALMHPDGSAVVVVLNRSSKDVPLTIKDPAVGFLETISPGYSIHTYLWRRQ

SEQ ID NO: 1623 - DNA, 1608 bp, synthetic construct
  misc_feature 1..1608: note = Variant of B-Glucocerebrosidase
  source 1..1608: mol_type = other DNA
atggagttttcttctcctagtagagaagaatgccccaagccactgagcagggtgagcatcatggctggatccctcacagggctgcttcttttgcaggcagtctcatgggcctctggagccaggccctgtattcccaagtcattcggctactcctcagtggtgtgtgtatgcaatgccacctattgtgacagtgtcgatcctctcactctccctgctctgggtaccttctcccggtatgagagcacaagaagtggaagacgcatggagctctcaatgggccctatacaggctaaccacactgggacaggtctgctgctgaccctccaacctgaacagaagtttcagaaagtcaagggatttggaggagccatgactgatgcagcagcactcaacatcttggccctgtctccaccagcccagaacctgctgttgaagtcctacttctcagaggaggggattgagtacaacatcatccgggttcccatggctagctgtgacttctccattaggacctatacatacgctgacacccccgatgattttcagctccataatttcagtctccctgaagaagacaccaaactgaagatacctctgattcacagagccttgcaactgtcccaaaggccagtgagcctcttggcttctccctggactagtcctacatggctgaagactaatggtgctgttaatgggaagggctccctgaaaggacagccaggtgacatatatcatcagacatgggcccgctactttgtgaaattccttgatgcctatgcagagcacaagctccaattctgggcagtcaccgcagaaaacgagccctcagctgggctgctgtctggctacccctttcagtgcttgggctttactcctgagcatcaacgggacttcattgcccgggatttggggccaacactggccaacagcacccaccacaatgtaagactcctcatgctggatgaccagaggctgctgctccctcattgggccaaggtggtgttgacagacccagaagctgccaaatatgttcatggcatcgctgtccactggtacctggattttttggcccctgccaaggctactctgggagagacccacagactcttccccaataccatgctgtttgcatcagaagcctgcgtggggagcaaattctgggagcagtctgttaggctgggttcctgggatcggggcatgcaatattcccatagtataatagagaacctcctctaccacgtggtaggatggacagactggaatctggctttgaacccagaaggaggccccaattgggtgcgcaactttgttgacagccccatcattgtggatatcacaaaggacaccttctacaaacagcctatgttctatcatctggggcactttagcaagttcattccagagggttcccagagagtaggcttggttgcctcacagaagaatgatctggatgctgtggcactcatgcatcctgacgggagtgcagtggtggtagtactgaacaggtctagcaaagatgttcccttgactatcaaagacccagctgtgggctttctggaaaccatttcccctggatactctatccacacctatctctggagaagacag

SEQ ID NO: 1624 - protein, 536 aa, synthetic construct
  REGION 1..536: note = Variant of B-Glucocerebrosidase
MEFSSPSREECPKPLSRVSIMAGSLTGLLLLQAVSWASGARPCIPKSFGYSSVVCVCNATYCDSVDPLTLPALGTFSRYESTRSGRRMELSMGPIQANHTGTGLLLTLQPEQKFQKVKGFGGAMTDAAALNILALSPPAQNLLLKSYFSEEGIEYNIIRVPMASCDFSIRTYTYADTPDDFQLHNFSLPEEDTKLKIPLIHRALQLSQRPVSLLASPWTSPTWLKTNGAVNGKGSLKGQPGDIYHQTWARYFVKFLDAYAEHKLQFWAVTAENEPSAGLLSGYPFQCLGFTPEHQRDFIARDLGPTLANSTHHNVRLLMLDDQRLLLPHWAKVVLTDPEAAKYVHGIAVHWYLDFLAPAKATLGETHRLFPNTMLFASEACVGSKFWEQSVRLGSWDRGMQYSHSIIENLLYHVVGWTDWNLALNPEGGPNWVRNFVDSPIIVDITKDTFYKQPMFYHLGHFSKFIPEGSQRVGLVASQKNDLDAVALMHPDGSAVVVVLNRSSKDVPLTIKDPAVGFLETISPGYSIHTYLWRRQ

SEQ ID NO: 1625 - DNA, 1608 bp, synthetic construct
  misc_feature 1..1608: note = Variant of B-Glucocerebrosidase
  source 1..1608: mol_type = other DNA
atggagttttcttctcctagtagagaagaatgccccaagccactgagcagggtgagcatcatggctggatccctcacagggctgcttcttttgcaggcagtctcatgggcctctggagccaggccctgtattcccaagtcattcggctactcctcagtggtgtgtgtatgcaatgccacctattgtgacagttttgatcctccaactttccctgctctgggtaccttctcccggtatgagagcacaagaagtggaagacgcatggagctctcaatgggccctatacaggctaaccacactgggacaggtctgctgctgaccctccaacctgaacagaagtttcagaaagtcaagggatttggaggagccatgactgatgcagcagcactcaacatcttggccctgtctccaccagcccagaacctgctgttgaagtcctacttctcagaggaggggattggctacaacatcatccgggttcccatggctagctgtgacttctccattaggacctatacatacgctgacacccccgatgattttcagctccataatttcagtctccctgaagaagacaccaaactgaagatacctctgattcacagagccttgcaactgtcccaaaggccagtgagcctcttggcttctccctggactagtcctacatggctgaagactaatggtgcttacaatgggaagggctccctgaaaggacagccaggtgacatatatcatcagacatgggcccgctactttgtgaaattccttgatgcctatgcagagcacgggctccaattctgggcagtcaccgcagaaaacgagccctcagctgggctgctgtctggctacccctttcagtgcttgggctttactcctgagcatcaacgggacttcattgcccgggatttggggccaacactggccaacagcacccaccacaatgtaagactcctcatgctggatgaccagaggctgctgctccctcattgggccaaggtggtgttgacaaacccagaagctgccaaatatgttcatggcatcgctgtccactggtacctggattttttggcccctgccaaggctactctgggagagacccacagactcttccccaataccatgctgtttgcatcagaagcctgcgtggggagcaaattctgggagcagtctgttaggctgggttcctgggatcggggcatgcaatattcccatagtataatagagaacctcctctaccacgtggtaggatggacagactggaatctggctttgaacccagaaggaggccccaattgggtgcgcaactttgttgacagccccatcattgtggatatcacaaaggacaccttctacaaacagcctatgttctatcatctggggcactttagcaagttcattccagagggttcccagagagtaggcttggttgcctcacagaagaatgatctggatgctgtggcactcatgcatcctgacgggagtgcagtggtggtagtactgaacaggtctagcaaagatgttcccttgactatcaaagacccagctgtgggctttctggaaaccatttcccctggatactctatccacacctatctctggagaagacag

SEQ ID NO: 1626 - protein, 536 aa, synthetic construct
  REGION 1..536: note = Variant of B-Glucocerebrosidase
MEFSSPSREECPKPLSRVSIMAGSLTGLLLLQAVSWASGARPCIPKSFGYSSVVCVCNATYCDSFDPPTFPALGTFSRYESTRSGRRMELSMGPIQANHTGTGLLLTLQPEQKFQKVKGFGGAMTDAAALNILALSPPAQNLLLKSYFSEEGIGYNIIRVPMASCDFSIRTYTYADTPDDFQLHNFSLPEEDTKLKIPLIHRALQLSQRPVSLLASPWTSPTWLKTNGAYNGKGSLKGQPGDIYHQTWARYFVKFLDAYAEHGLQFWAVTAENEPSAGLLSGYPFQCLGFTPEHQRDFIARDLGPTLANSTHHNVRLLMLDDQRLLLPHWAKVVLTNPEAAKYVHGIAVHWYLDFLAPAKATLGETHRLFPNTMLFASEACVGSKFWEQSVRLGSWDRGMQYSHSIIENLLYHVVGWTDWNLALNPEGGPNWVRNFVDSPIIVDITKDTFYKQPMFYHLGHFSKFIPEGSQRVGLVASQKNDLDAVALMHPDGSAVVVVLNRSSKDVPLTIKDPAVGFLETISPGYSIHTYLWRRQ

SEQ ID NO: 1627 - DNA, 1608 bp, synthetic construct
  misc_feature 1..1608: note = Variant of B-Glucocerebrosidase
  source 1..1608: mol_type = other DNA
atggagttttcttctcctagtagagaagaatgccccaagccactgagcagggtgagcatcatggctggatccctcacagggctgcttcttttgcaggcagtctcatgggcctctggagccaggccctgtattcccaagtcattcggctactcctcagtggtgtgtgtatgcaatgccacctattgtgacagttttgatcctccaactttccctgctctgggtaccttctcccggtatgagagcacaagaagtggaagacgcatggagctctcaatgggccctatacaggctaaccacactgggacaggtctgctgctgaccctccaacctgaacagaagtttcagaaagtcaagggatttggaggagccatgactgatgcagcagcactcaacatcttggccctgtctccaccagcccagaacctgctgttgaagtcctacttctcagaggaggggattggctacaacatcatccgggttcccatggctagctgtgacttctccattaggacctatacatacgctgacacccccgatgattttcagctccataatttcagtctccctgaagaagacaccaaatggaagatacctctgattcacagagccttgcaactggcacaaaggccagtgagcctcttcgcttctccctggactagtcctacatggctgaagactaatggtgcttacaatgggaagggctccctgaaaggacagccaggtgacatatatcatcagacatgggcccgctactttgtgaaattccttgatgcctatgcagagcacaagctccaattctgggcagtcaccgcagaaaacgagccctcagctgggctgctgtctggctacccctttcagtgcttgggctttactcctgagcatcaacgggacttcattgcccgggatttggggccaacactggccaacagcacccaccacaatgtaagactcctcatgctggatgaccagaggctgctgctccctcattgggccaaggtggtgttgacagacccagaagctgccaaatatgttcatggcatcgctgtccactggtacctggattttttggcccctgccaaggctactctgggagagacccacagactcttccccaataccatgctgtttgcatcagaagcctgcgtggggagcaaattctgggagcagtctgttaggctgggttcctgggatcggggcatgcaatattcccatagtataatagagaacctcctctaccacgtggtaggatggacagactggaatctggctttgaacccagaaggaggccccaattgggtgcgcaactttgttgacagccccatcattgtggatatcacaaaggacaccttctacaaacagcctatgttctatcatctggggcactttagcaagttcattccagagggttcccagagagtaggcttggttgcctcacagaagaatgatctggatgctgtggcactcatgcatcctgacgggagtgcagtggtggtagtactgaacaggtctagcaaagatgttcccttgactatcaaagacccagctgtgggctttctggaaaccatttcccctggatactctatccacacctatctctggagaagacag

SEQ ID NO: 1628 - protein, 536 aa, synthetic construct
  REGION 1..536: note = Variant of B-Glucocerebrosidase
MEFSSPSREECPKPLSRVSIMAGSLTGLLLLQAVSWASGARPCIPKSFGYSSVVCVCNATYCDSFDPPTFPALGTFSRYESTRSGRRMELSMGPIQANHTGTGLLLTLQPEQKFQKVKGFGGAMTDAAALNILALSPPAQNLLLKSYFSEEGIGYNIIRVPMASCDFSIRTYTYADTPDDFQLHNFSLPEEDTKWKIPLIHRALQLAQRPVSLFASPWTSPTWLKTNGAYNGKGSLKGQPGDIYHQTWARYFVKFLDAYAEHKLQFWAVTAENEPSAGLLSGYPFQCLGFTPEHQRDFIARDLGPTLANSTHHNVRLLMLDDQRLLLPHWAKVVLTDPEAAKYVHGIAVHWYLDFLAPAKATLGETHRLFPNTMLFASEACVGSKFWEQSVRLGSWDRGMQYSHSIIENLLYHVVGWTDWNLALNPEGGPNWVRNFVDSPIIVDITKDTFYKQPMFYHLGHFSKFIPEGSQRVGLVASQKNDLDAVALMHPDGSAVVVVLNRSSKDVPLTIKDPAVGFLETISPGYSIHTYLWRRQ

SEQ ID NO: 1629 - DNA, 1608 bp, synthetic construct
  misc_feature 1..1608: note = Variant of B-Glucocerebrosidase
  source 1..1608: mol_type = other DNA
atggagttttcttctcctagtagagaagaatgccccaagccactgagcagggtgagcatcatggctggatccctcacagggctgcttcttttgcaggcagtctcatgggcctctggagccaggccctgtattcccaagtcattcggctactcctcagtggtgtgtgtatgcaatgccacctattgtgacagttttgatcctccaactttccctgctctgggtaccttctcccggtatgagagcacaagaagtggaagacgcatggagctctcaatgggccctatacaggctaaccacactgggacaggtctgctgctgaccctccaacctgaacagaagtttcagaaagtcaagggatttggaggagccatgactgatgcagcagcactcaacatcttggccctgtctccaccagcccagaacctgctgttgaagtcctacttctcagaggaggggattggctacaacatcatccgggttcccatggctagctgtgacttctccattaggacctatacatacgctgacacccccgatgattttcagctccataatttcagtctccctgaagaagacaccaaactgaagatacctctgattcacagagccttgcaactgtcccaaaggccagtgagcctcttggcttctccctggactagtcctacatggctgaagactaatggtgcttacaatgggaagggctccctgaaaggacagccaggtgacatatatcatcagacatgggcccgctactttgtgaaattccttgatgcctatgcagagcacaagctccaattctgggcagtcaccgcagaaaacgagccctcagctgggctgctgtctggctacccctttcagtgcttgggctttactcctgagcatcaacgggacttcattgcccgggatttggggccaacactggccaacagcacccaccacaatgtaagactcctcatgctggatgaccagaggctgctgctccctcattgggccaaggtggtgttgacagacccagaagctgccaaatatgttcatggcatcgctgtccactggtacctggattttttggcccctgccaaggctactctgggagagacccacagactcttccccaataccatgctgtttgcatcagaagcctgcgtggggagcaaattctgggagcagtctgttaggctgggttcctgggatcggggcatgcaatattcccatagtataatagagaacctcctctaccacgtggtaggatggacagactggaatctggctttgaacccagaaggaggccccaattgggtgcgcaactttgttgacagccccatcattgtggatatcacaaaggacaccttctacaaacagcctatgttctatcatctggggcactttagcaagttcattccagagggttcccagagagtaggcttggttgcctcacagaagaatgatctggatgctgtggcactcctgcatcctgacgggagtgcagtggtggtagtactgaacaggtctagcaaagatgttcccttgactatcaaagacccagctgtgggctttctggaaaccatttcccctggatactctatccacacctatctctggagaagacag

SEQ ID NO: 1630 - protein, 536 aa, synthetic construct
  REGION 1..536: note = Variant of B-Glucocerebrosidase
MEFSSPSREECPKPLSRVSIMAGSLTGLLLLQAVSWASGARPCIPKSFGYSSVVCVCNATYCDSFDPPTFPALGTFSRYESTRSGRRMELSMGPIQANHTGTGLLLTLQPEQKFQKVKGFGGAMTDAAALNILALSPPAQNLLLKSYFSEEGIGYNIIRVPMASCDFSIRTYTYADTPDDFQLHNFSLPEEDTKLKIPLIHRALQLSQRPVSLLASPWTSPTWLKTNGAYNGKGSLKGQPGDIYHQTWARYFVKFLDAYAEHKLQFWAVTAENEPSAGLLSGYPFQCLGFTPEHQRDFIARDLGPTLANSTHHNVRLLMLDDQRLLLPHWAKVVLTDPEAAKYVHGIAVHWYLDFLAPAKATLGETHRLFPNTMLFASEACVGSKFWEQSVRLGSWDRGMQYSHSIIENLLYHVVGWTDWNLALNPEGGPNWVRNFVDSPIIVDITKDTFYKQPMFYHLGHFSKFIPEGSQRVGLVASQKNDLDAVALLHPDGSAVVVVLNRSSKDVPLTIKDPAVGFLETISPGYSIHTYLWRRQ

SEQ ID NO: 1631 - DNA, 1608 bp, synthetic construct
  misc_feature 1..1608: note = Variant of B-Glucocerebrosidase
  source 1..1608: mol_type = other DNA
atggagttttcttctcctagtagagaagaatgccccaagccactgagcagggtgagcatcatggctggatccctcacagggctgcttcttttgcaggcagtctcatgggcctctggagccaggccctgtattcccaagtcattcggctactcctcagtggtgtgtgtatgcaatgccacctattgtgacagttttgatcctccaactttccctgctctgggtaccttctcccggtatgagagcacaagaagtggaagacgcatggagctctcaatgggccctatacaggctaaccacactgggacaggtctgctgctgaccctccaacctgaacagaagtttcagaaagtcaagggatttggaggagccatgactgatgcagcagcactcaacatcttggccctgtctccaccagcccagaacctgctgttgaagtcctacttctcagaggaggggattggctacaacatcatccgggttcccatggctagctgtgacttctccattaggacctatacatacgctgacacccccgatgattttcagctccataatttcagtctccctgaagaagacaccaaactgaagatacctctgattcacagagccttgcaactggcacaaaggccagtgagcctcttcgcttctccctggactagtcctacatggctgaagactaatggtgcttacaatgggaagggctccctgaaaggacagccaggtgacatatatcatcagacatgggcccgctactttgtgaaattccttgatgcctatgcagagcacaagctccaattctgggcagtcaccgcagaaaacgagccctcagctgggctgctgtctggctacccctttcagtgcttgggctttactcctgagcatcaacgggacttcattgcccgggatttggggccaacactggccaacagcacccaccacaatgtaagactcctcatgctggatgaccagaggctgctgctccctcattgggccaaggtggtgttgacagacccagaagctgccaaatatgttcatggcatcgctgtccactggtacctggattttttggcccctgccaaggctactctgggagagacccacagactcttccccaataccatgctgtttgcatcagaagcctgcgtggggagcaaattctgggagcagtctgttaggctgggttcctgggatcggggcatgcaatattcccatagtataatagagaacctcctctaccacgtggtaggatggacagactggaatctggctttgaacccagaaggaggccccaattgggtgcgcaactttgttgacagccccatcattgtggatatcacaaaggacaccttctacaaacagcctatgttctatcatctggggcactttagcaagttcattccagagggttcccagagagtaggcttggttgcctcacagaagaatgatctggatgctgtggcactcatgcatcctgacgggagtgcagtggtggtagtactgaacaggtctagcaaagatgttcccttgactatcaaagacccagctgtgggctttctggaaaccatttcccctggatactctatccacacctatctctggagaagacag

SEQ ID NO: 1632 - protein, 536 aa, synthetic construct
  REGION 1..536: note = Variant of B-Glucocerebrosidase
MEFSSPSREECPKPLSRVSIMAGSLTGLLLLQAVSWASGARPCIPKSFGYSSVVCVCNATYCDSFDPPTFPALGTFSRYESTRSGRRMELSMGPIQANHTGTGLLLTLQPEQKFQKVKGFGGAMTDAAALNILALSPPAQNLLLKSYFSEEGIGYNIIRVPMASCDFSIRTYTYADTPDDFQLHNFSLPEEDTKLKIPLIHRALQLAQRPVSLFASPWTSPTWLKTNGAYNGKGSLKGQPGDIYHQTWARYFVKFLDAYAEHKLQFWAVTAENEPSAGLLSGYPFQCLGFTPEHQRDFIARDLGPTLANSTHHNVRLLMLDDQRLLLPHWAKVVLTDPEAAKYVHGIAVHWYLDFLAPAKATLGETHRLFPNTMLFASEACVGSKFWEQSVRLGSWDRGMQYSHSIIENLLYHVVGWTDWNLALNPEGGPNWVRNFVDSPIIVDITKDTFYKQPMFYHLGHFSKFIPEGSQRVGLVASQKNDLDAVALMHPDGSAVVVVLNRSSKDVPLTIKDPAVGFLETISPGYSIHTYLWRRQ

SEQ ID NO: 1633 - DNA, 1608 bp, synthetic construct
  misc_feature 1..1608: note = Variant of B-Glucocerebrosidase
  source 1..1608: mol_type = other DNA
atggagttttcttctcctagtagagaagaatgccccaagccactgagcagggtgagcatcatggctggatccctcacagggctgcttcttttgcaggcagtctcatgggcctctggagccaggccctgtattcccaagtcattcggctactcctcagtggtgtgtgtatgcaatgccacctattgtgacagttttgatcctccaactttccctgctctgggtaccttctcccggtatgagagcacaagaagtggaagacgcatggagctctcaatgggccctatacaggctaaccacactgggacaggtctgctgctgaccctccaacctgaacagaagtttcagaaagtcaagggatttggaggagccatgactgatgcagcagcactcaacatcttggccctgtctccaccagcccagaacctgctgttgaagtcctacttctcagaggaggggattggctacaacatcatccgggttcccatggctagctgtgacttctccattaggacctatacatacgctgacacccccgatgattttcagctccataatttcagtctccctgaagaagacaccaaactgaagatacctctgattcacagagccttgcaactggcacaaaggccagtgagcctcttggcttctccctggactagtcctacatggctgaagactaatggtgcttacaatgggaagggctccctgaaaggacagccaggtgacatatatcatcagacatgggcccgctactttgtgaaattccttgatgcctatgcagagcacaagctccaattctgggcagtcaccgcagaaaacgagccctcagctgggctgctgtctggctacccctttcagtgcttgggctttactcctgagcatcaacgggacttcattgcccgggatttggggccaacactggccaacagcacccaccacaatgtaagactcctcatgctggatgaccagaggctgctgctccctcattgggccaaggtggtgttgacagacccagaagctgccaaatatgttcatggcatcgctgtccactggtacctggattttttggcccctgccaagtggactctgggagagacccacagactcttccccaataccatgctgtttgcatcagaagcctgcgtggggagcaaattctgggagcagtctgttaggctgggttcctgggatcggggcatgcaatattcccatagtataatagagaacctcctctaccacgtggtaggatggacagactggaatctggctttgaacccagaaggaggccccaattgggtgcgcaactttgttgacagccccatcattgtggatatcacaaaggacaccttctacaaacagcctatgttctatcatctggggcactttagcaagttcattccagagggttcccagagagtaggcttggttgcctcacagaagaatgatctggatgctgtggcactcatgcatcctgacgggagtgcagtggtggtagtactgaacaggtctagcaaagatgttcccttgactatcaaagacccagctgtgggctttctggaaaccatttcccctggatactctatccacacctatctctggagaagacag

SEQ ID NO: 1634 - protein, 536 aa, synthetic construct
  REGION 1..536: note = Variant of B-Glucocerebrosidase
MEFSSPSREECPKPLSRVSIMAGSLTGLLLLQAVSWASGARPCIPKSFGYSSVVCVCNATYCDSFDPPTFPALGTFSRYESTRSGRRMELSMGPIQANHTGTGLLLTLQPEQKFQKVKGFGGAMTDAAALNILALSPPAQNLLLKSYFSEEGIGYNIIRVPMASCDFSIRTYTYADTPDDFQLHNFSLPEEDTKLKIPLIHRALQLAQRPVSLLASPWTSPTWLKTNGAYNGKGSLKGQPGDIYHQTWARYFVKFLDAYAEHKLQFWAVTAENEPSAGLLSGYPFQCLGFTPEHQRDFIARDLGPTLANSTHHNVRLLMLDDQRLLLPHWAKVVLTDPEAAKYVHGIAVHWYLDFLAPAKWTLGETHRLFPNTMLFASEACVGSKFWEQSVRLGSWDRGMQYSHSIIENLLYHVVGWTDWNLALNPEGGPNWVRNFVDSPIIVDITKDTFYKQPMFYHLGHFSKFIPEGSQRVGLVASQKNDLDAVALMHPDGSAVVVVLNRSSKDVPLTIKDPAVGFLETISPGYSIHTYLWRRQ

SEQ ID NO: 1635 - DNA, 1608 bp, synthetic construct
  misc_feature 1..1608: note = Variant of B-Glucocerebrosidase
  source 1..1608: mol_type = other DNA
atggagttttcttctcctagtagagaagaatgccccaagccactgagcagggtgagcatcatggctggatccctcacagggctgcttcttttgcaggcagtctcatgggcctctggagccaggccctgtattcccaagtcattcggctactcctcagtggtgtgtgtatgcaatgccacctattgtgacagttttgatcctccaactttccctgctctgggtaccttctcccggtatgagagcacaagaagtggaagacgcatggagctctcaatgggccctatacaggctaaccacactgggacaggtctgctgctgaccctccaacctgaacagaagtttcagaaagtcaagggatttggaggagccatgactgatgcagcagcactcaacatcttggccctgtctccaccagcccagaacctgctgttgaagtcctacttctcagaggaggggattggctacaacatcatccgggttcccatggctagctgtgacttctccattaggacctatacatacgctgacacccccgatgattttcagctccataatttcagtctccctgaagaagacaccaaactgaagatacctctgattcacagagccttgcaactgtcccaaaggccagtgagcctcttcgcttctccctggactagtcctacatggctgaagactaatggtgctgttaatgggaagggctccctgaaaggacagccaggtgacatatatcatcagacatgggcccgctactttgtgaaattccttgatgcctatgcagagcacaagctccaattctgggcagtcaccgcagaaaacgagccctcagctgggctgctgtctggctacccctttcagtgcttgggctttactcctgagcatcaacgggacttcattgcccgggatttggggccaacactggccaacagcacccaccacaatgtaagactcctcatgctggatgaccagaggctgctgctccctcattgggccaaggtggtgttgacagacccagaagctgccaaatatgttcatggcatcgctgtccactggtacctggattttttggcccctgccaaggctactctgggagagacccacagactcttccccaataccatgctgtttgcatcagaagcctgcgtggggagcaaattctgggagcagtctgttaggctgggttcctgggatcggggcatgcaatattcccatagtataatagagaacctcctctaccacgtggtaggatggacagactggaatctggctttgaacccagaaggaggccccaattgggtgcgcaactttgttgacagccccatcattgtggatatcacaaaggacaccttctacaaacagcctatgttctatcatctggggcactttagcaagttcattccagagggttcccagagagtaggcttggttgcctcacagaagaatgatctggatgctgtggcactcatgcatcctgacgggagtgcagtggtggtagtactgaacaggtctagcaaagatgttcccttgactatcaaagacccagctgtgggctttctggaaaccatttcccctggatactctatccacacctatctctggagaagacag

SEQ ID NO: 1636 - protein, 536 aa, synthetic construct
  REGION 1..536: note = Variant of B-Glucocerebrosidase
MEFSSPSREECPKPLSRVSIMAGSLTGLLLLQAVSWASGARPCIPKSFGYSSVVCVCNATYCDSFDPPTFPALGTFSRYESTRSGRRMELSMGPIQANHTGTGLLLTLQPEQKFQKVKGFGGAMTDAAALNILALSPPAQNLLLKSYFSEEGIGYNIIRVPMASCDFSIRTYTYADTPDDFQLHNFSLPEEDTKLKIPLIHRALQLSQRPVSLFASPWTSPTWLKTNGAVNGKGSLKGQPGDIYHQTWARYFVKFLDAYAEHKLQFWAVTAENEPSAGLLSGYPFQCLGFTPEHQRDFIARDLGPTLANSTHHNVRLLMLDDQRLLLPHWAKVVLTDPEAAKYVHGIAVHWYLDFLAPAKATLGETHRLFPNTMLFASEACVGSKFWEQSVRLGSWDRGMQYSHSIIENLLYHVVGWTDWNLALNPEGGPNWVRNFVDSPIIVDITKDTFYKQPMFYHLGHFSKFIPEGSQRVGLVASQKNDLDAVALMHPDGSAVVVVLNRSSKDVPLTIKDPAVGFLETISPGYSIHTYLWRRQ

SEQ ID NO: 1637 - DNA, 1608 bp, synthetic construct
  misc_feature 1..1608: note = Variant of B-Glucocerebrosidase
  source 1..1608: mol_type = other DNA
atggagttttcttctcctagtagagaagaatgccccaagccactgagcagggtgagcatcatggctggatccctcacagggctgcttcttttgcaggcagtctcatgggcctctggagccaggccctgtattcccaagtcattcggctactcctcagtggtgtgtgtatgcaatgccacctattgtgacagttttgatcctccaactttccctgctctgggtaccttctcccggtatgagagcacaagaagtggaagacgcatggagctctcaatgggccctatacaggctaaccacactgggacaggtctgctgctgaccctccaacctgaacagaagtttcagaaagtcaagggatttggaggagccatgactgatgcagcagcactcaacatcttggccctgtctccaccagcccagaacctgctgttgaagtcctacttctcagaggaggggattggctacaacatcatccgggttcccatggctagctgtgacttctccattaggacctatacatacgctgacacccccgatgattttcagctccataatttcagtctccctgaagaagacaccaaactgaagatacctctgattcacagagccttgcaactggcacaaaggccagtgagcctcttcgcttctccctggactagtcctacatggctgaagactaatggtgctgttaatgggaagggctccctgaaaggacagccaggtgacatatatcatcagacatgggcccgctactttgtgaaattccttgatgcctatgcagagcacgggctccaattctgggcagtcaccgcagaaaacgagccctcagctgggctgctgtctggctacccctttcagtgcttgggctttactcctgagcatcaacgggacttcattgcccgggatttggggccaacactggccaacagcacccaccacaatgtaagactcctcatgctggatgaccagaggctgctgctccctcattgggccaaggtggtgttgacagacccagaagctgccaaatatgttcatggcatcgctgtccactggtacctggattttttggcccctgccaaggctactctgggagagacccacagactcttccccaataccatgctgtttgcatcagaagcctgcgtggggagcaaattctgggagcagtctgttaggctgggttcctgggatcggggcatgcaatattcccatagtataatagagaacctcctctaccacgtggtaggatggacagactggaatctggctttgaacccagaaggaggccccaattgggtgcgcaactttgttgacagccccatcattgtggatatcacaaaggacaccttctacaaacagcctatgttctatcatctggggcactttagcaagttcattccagagggttcccagagagtaggcttggttgcctcacagaagaatgatctggatgctgtggcactcatgcatcctgacgggagtgcagtggtggtagtactgaacaggtctagcaaagatgttcccttgactatcaaagacccagctgtgggctttctggaaaccatttcccctggatactctatccacacctatctctggagaagacag

SEQ ID NO: 1638 - protein, 536 aa, synthetic construct
  REGION 1..536: note = Variant of B-Glucocerebrosidase
MEFSSPSREECPKPLSRVSIMAGSLTGLLLLQAVSWASGARPCIPKSFGYSSVVCVCNATYCDSFDPPTFPALGTFSRYESTRSGRRMELSMGPIQANHTGTGLLLTLQPEQKFQKVKGFGGAMTDAAALNILALSPPAQNLLLKSYFSEEGIGYNIIRVPMASCDFSIRTYTYADTPDDFQLHNFSLPEEDTKLKIPLIHRALQLAQRPVSLFASPWTSPTWLKTNGAVNGKGSLKGQPGDIYHQTWARYFVKFLDAYAEHGLQFWAVTAENEPSAGLLSGYPFQCLGFTPEHQRDFIARDLGPTLANSTHHNVRLLMLDDQRLLLPHWAKVVLTDPEAAKYVHGIAVHWYLDFLAPAKATLGETHRLFPNTMLFASEACVGSKFWEQSVRLGSWDRGMQYSHSIIENLLYHVVGWTDWNLALNPEGGPNWVRNFVDSPIIVDITKDTFYKQPMFYHLGHFSKFIPEGSQRVGLVASQKNDLDAVALMHPDGSAVVVVLNRSSKDVPLTIKDPAVGFLETISPGYSIHTYLWRRQ

SEQ ID NO: 1639 - DNA, 1608 bp, synthetic construct
  misc_feature 1..1608: note = Variant of B-Glucocerebrosidase
  source 1..1608: mol_type = other DNA
atggagttttcttctcctagtagagaagaatgccccaagccactgagcagggtgagcatcatggctggatccctcacagggctgcttcttttgcaggcagtctcatgggcctctggagccaggccctgtattcccaagtcattcggctactcctcagtggtgtgtgtatgcaatgccacctattgtgacagttttgatcctccaactttccctgctctgggtaccttctcccggtatgagagcacaagaagtggaagacgcatggagctctcaatgggccctatacaggctaaccacactgggacaggtctgctgctgaccctccaacctgaacagaagtttcagaaagtcaagggatttggaggagccatgactgatgcagcagcactcaacatcttggccctgtctccaccagcccagaacctgctgttgaagtcctacttctcagaggaggggattggctacaacatcatccgggttcccatggctagctgtgacttctccattaggacctatacatacgctgacacccccgatgattttcagctccataatttcagtctccctgaagaagacaccaaactgaagatacctctgattcacagagccttgcaactggcacaaaggccagtgagcctcttggcttctccctggactagtcctacatggctgaagactaatggtgcttacaatgggaagggctccctgaaaggacagccaggtgacatatatcatcagacatgggcccgctactttgtgaaattccttgatgcctatgcagagcacaagctccaattctgggcagtcaccgcagaaaacgagccctcagctgggctgctgtctggctacccctttcagtgcttgggctttactcctgagcatcaacgggacttcattgcccgggatttggggccaacactggccaacagcacccaccacaatgtaagactcctcatgctggatgaccagaggctgctgctccctcattgggccaaggtggtgttgacagacccagaagctgccaaatatgttcatggcatcgctgtccactggtacctggattttttggcccctgccaaggctactctgggagagacccacagactcttccccaataccacactgtttgcatcagaagcctgcgtggggagcaaattctgggagcagtctgttaggctgggttcctgggatcggggcatgcaatattcccatagtataatagagaacctcctctaccacgtggtaggatggacagactggaatctggctttgaacccagaaggaggccccaattgggtgcgcaactttgttgacagccccatcattgtggatatcacaaaggacaccttctacaaacagcctatgttctatcatctggggcactttagcaagttcattccagagggttcccagagagtaggcttggttgcctcacagaagaatgatctggatgctgtggcactcatgcatcctgacgggagtgcagtggtggtagtactgaacaggtctagcaaagatgttcccttgactatcaaagacccagctgtgggctttctggaaaccatttcccctggatactctatccacacctatctctggagaagacag

SEQ ID NO: 1640 - protein, 536 aa, synthetic construct
  REGION 1..536: note = Variant of B-Glucocerebrosidase
MEFSSPSREECPKPLSRVSIMAGSLTGLLLLQAVSWASGARPCIPKSFGYSSVVCVCNATYCDSFDPPTFPALGTFSRYESTRSGRRMELSMGPIQANHTGTGLLLTLQPEQKFQKVKGFGGAMTDAAALNILALSPPAQNLLLKSYFSEEGIGYNIIRVPMASCDFSIRTYTYADTPDDFQLHNFSLPEEDTKLKIPLIHRALQLAQRPVSLLASPWTSPTWLKTNGAYNGKGSLKGQPGDIYHQTWARYFVKFLDAYAEHKLQFWAVTAENEPSAGLLSGYPFQCLGFTPEHQRDFIARDLGPTLANSTHHNVRLLMLDDQRLLLPHWAKVVLTDPEAAKYVHGIAVHWYLDFLAPAKATLGETHRLFPNTTLFASEACVGSKFWEQSVRLGSWDRGMQYSHSIIENLLYHVVGWTDWNLALNPEGGPNWVRNFVDSPIIVDITKDTFYKQPMFYHLGHFSKFIPEGSQRVGLVASQKNDLDAVALMHPDGSAVVVVLNRSSKDVPLTIKDPAVGFLETISPGYSIHTYLWRRQ

SEQ ID NO: 1641 - DNA, 1608 bp, synthetic construct
  misc_feature 1..1608: note = Variant of B-Glucocerebrosidase
  source 1..1608: mol_type = other DNA
atggagttttcttctcctagtagagaagaatgccccaagccactgagcagggtgagcatcatggctggatccctcacagggctgcttcttttgcaggcagtctcatgggcctctggagccaggccctgtattcccaagtcattcggctactcctcagtggtgtgtgtatgcaatgccacctattgtgacagttttgatcctccaactttccctgctctgggtaccttctcccggtatgagagcacaagaagtggaagacgcatggagctctcaatgggccctatacaggctaaccacactgggacaggtctgctgctgaccctccaacctgaacagaagtttcagaaagtcaagggatttggaggagccatgactgatgcagcagcactcaacatcttggccctgtctccaccagcccagaacctgctgttgaagtcctacttctcagaggaggggattggctacaacatcatccgggttcccatggctagctgtgacttctccattaggacctatacatacgctgacacccccgatgattttcagctccataatttcagtctccctgaagaagacaccaaactgaagatacctctgattcacagagccttgcaactgtcccaaaggccagtgagcctcttggcttctccctggactagtcctacatggctgaagactaatggtgctgttaatgggaagggctccctgaaaggacagccaggtgacatatatcatcagacatgggcccgctactttgtgaaattccttgatgcctatgcagagcacaagctccaattctgggcagtcaccgcagaaaacgagccctcagctgggctgctgtctggctacccctttcagtgcttgggctttactcctgagcatcaacgggacttcattgcccgggatttggggccaacactggccaacagcacccaccacaatgtaagactcctcatgctggatgaccagaggctgctgctccctcattgggccaaggtggtgttgacagacccagaagctgccaaatatgttcatggcatcgctgtccactggtacctggattttttggcccctgccaaggctactctgggagagacccacagactcttccccaataccatgctgtttgcatcagaagcctgcgtggggagcaaattctgggagcagtctgttaggctgggttcctgggatcggggcatgcaatattcccatagtataatagagaacctcctctaccacgtggtaggatggacagactggaatctggctttgaacccagaaggaggccccaattgggtgcgcaactttgttgacagccccatcattgtggatatcacaaaggacaccttctacaaacagcctatgttctatcatctggggcactttagcaagttcattccagagggttcccagagagtaggcttggttgcctcacagaagaatgatctggatgctgtggcactcatgcatcctgacgggagtgcagtggtggtagtactgaacaggtctagcaaagatgttcccttgactatcaaagacccagctgtgggctttctggaaaccatttcccctggatactctatccacacctatctctggagaagacag

SEQ ID NO: 1642 - protein, 536 aa, synthetic construct
  REGION 1..536: note = Variant of B-Glucocerebrosidase
MEFSSPSREECPKPLSRVSIMAGSLTGLLLLQAVSWASGARPCIPKSFGYSSVVCVCNATYCDSFDPPTFPALGTFSRYESTRSGRRMELSMGPIQANHTGTGLLLTLQPEQKFQKVKGFGGAMTDAAALNILALSPPAQNLLLKSYFSEEGIGYNIIRVPMASCDFSIRTYTYADTPDDFQLHNFSLPEEDTKLKIPLIHRALQLSQRPVSLLASPWTSPTWLKTNGAVNGKGSLKGQPGDIYHQTWARYFVKFLDAYAEHKLQFWAVTAENEPSAGLLSGYPFQCLGFTPEHQRDFIARDLGPTLANSTHHNVRLLMLDDQRLLLPHWAKVVLTDPEAAKYVHGIAVHWYLDFLAPAKATLGETHRLFPNTMLFASEACVGSKFWEQSVRLGSWDRGMQYSHSIIENLLYHVVGWTDWNLALNPEGGPNWVRNFVDSPIIVDITKDTFYKQPMFYHLGHFSKFIPEGSQRVGLVASQKNDLDAVALMHPDGSAVVVVLNRSSKDVPLTIKDPAVGFLETISPGYSIHTYLWRRQ

SEQ ID NO: 1643 - DNA, 1608 bp, synthetic construct
  misc_feature 1..1608: note = Variant of B-Glucocerebrosidase
  source 1..1608: mol_type = other DNA
atggagttttcttctcctagtagagaagaatgccccaagccactgagcagggtgagcatcatggctggatccctcacagggctgcttcttttgcaggcagtctcatgggcctctggagccaggccctgtattcccaagtcattcggctactcctcagtggtgtgtgtatgcaatgccacctattgtgacagttttgatcctccaactttccctgctctgggtaccttctcccggtatgagagcacaagaagtggaagacgcatggagctctcaatgggccctatacaggctaaccacactgggacaggtctgctgctgaccctccaacctgaacagaagtttcagaaagtcaagggatttggaggagccatgactgatgcagcagcactcaacatcttggccctgtctccaccagcccagaacctgctgttgaagtcctacttctcagaggaggggattggctacaacatcatccgggttcccatggctagctgtgacttctccattaggacctatacatacgctgacacccccgatgattttcagctccataatttcagtctccctgaagaagacaccaaatggaagatacctctgattcacagagccttgcaactggcacaaaggccagtgagcctcttcgcttctccctggactagtcctacatggctgaagactaatggtgctgttaatgggaagggctccctgaaaggacagccaggtgacatatatcatcagacatgggcccgctactttgtgaaattccttgatgcctatgcagagcacgggctccaattctgggcagtcaccgcagaaaacgagccctcagctgggctgctgtctggctacccctttcagtgcttgggctttactcctgagcatcaacgggacttcattgcccgggatttggggccaacactggccaacagcacccaccacaatgtaagactcctcatgctggatgaccagaggctgctgctccctcattgggccaaggtggtgttgacagacccagaagctgccaaatatgttcatggcatcgctgtccactggtacctggattttttggcccctgccaaggctactctgggagagacccacagactcttccccaataccatgctgtttgcatcagaagcctgcgtggggagcaaattctgggagcagtctgttaggctgggttcctgggatcggggcatgcaatattcccatagtataataactaacctcctctaccacgtggtaggatggacagactggaatctggctttgaacccagaaggaggccccaattgggtgcgcaactttgttgacagccccatcattgtggatatcacaaaggacaccttctacaaacagcctatgttctatcatctggggcactttagcaagttcattccagagggttcccagagagtaggcttggttgcctcacagaagaatgatctggatgctgtggcactcatgcatcctgacgggagtgcagtggtggtagtactgaacaggtctagcaaagatgttcccttgactatcaaagacccagctgtgggctttctggaaaccatttcccctggatactctatccacacctatctctggagaagacag

SEQ ID NO: 1644 - protein, 536 aa, synthetic construct
  REGION 1..536: note = Variant of B-Glucocerebrosidase
MEFSSPSREECPKPLSRVSIMAGSLTGLLLLQAVSWASGARPCIPKSFGYSSVVCVCNATYCDSFDPPTFPALGTFSRYESTRSGRRMELSMGPIQANHTGTGLLLTLQPEQKFQKVKGFGGAMTDAAALNILALSPPAQNLLLKSYFSEEGIGYNIIRVPMASCDFSIRTYTYADTPDDFQLHNFSLPEEDTKWKIPLIHRALQLAQRPVSLFASPWTSPTWLKTNGAVNGKGSLKGQPGDIYHQTWARYFVKFLDAYAEHGLQFWAVTAENEPSAGLLSGYPFQCLGFTPEHQRDFIARDLGPTLANSTHHNVRLLMLDDQRLLLPHWAKVVLTDPEAAKYVHGIAVHWYLDFLAPAKATLGETHRLFPNTMLFASEACVGSKFWEQSVRLGSWDRGMQYSHSIITNLLYHVVGWTDWNLALNPEGGPNWVRNFVDSPIIVDITKDTFYKQPMFYHLGHFSKFIPEGSQRVGLVASQKNDLDAVALMHPDGSAVVVVLNRSSKDVPLTIKDPAVGFLETISPGYSIHTYLWRRQ

SEQ ID NO: 1645 - DNA, 1608 bp, synthetic construct
  misc_feature 1..1608: note = Variant of B-Glucocerebrosidase
  source 1..1608: mol_type = other DNA
atggagttttcttctcctagtagagaagaatgccccaagccactgagcagggtgagcatcatggctggatccctcacagggctgcttcttttgcaggcagtctcatgggcctctggagccaggccctgtattcccaagtcattcggctactcctcagtggtgtgtgtatgcaatgccacctattgtgacagttttgatcctccaactttccctgctctgggtaccttctcccggtatgagagcacaagaagtggaagacgcatggagctctcaatgggccctatacaggctaaccacactgggacaggtctgctgctgaccctccaacctgaacagaagtttcagaaagtcaagggatttggaggagccatgactgatgcagcagcactcaacatcttggccctgtctccaccagcccagaacctgctgttgaagtcctacttctcagaggaggggattggctacaacatcatccgggttcccatggctagctgtgacttctccattaggacctatacatacgctgacacccccgatgattttcagctccataatttcagtctccctgaagaagacaccaaactgaagatacctctgattcacagagccttgcaactggcacaaaggccagtgagcctcttggcttctccctggactagtcctacatggctgaagactaatggtgctgttaatgggaagggctccctgaaaggacagccaggtgacatatatcatcagacatgggcccgctactttgtgaaattccttgatgcctatgcagagcacaagctccaattctgggcagtcaccgcagaaaacgagccctcagctgggctgctgtctggctacccctttcagtgcttgggctttactcctgagcatcaacgggacttcattgcccgggatttggggccaacactggccaacagcacccaccacaatgtaagactcctcatgctggatgaccagaggctgctgctccctcattgggccaaggtggtgttgacagacccagaagctgccaaatatgttcatggcatcgctgtccactggtacctggattttttggcccctgccaaggctactctgggagagacccacagactcttccccaataccacactgtttgcatcagaagcctgcgtggggagcaaattctgggagcagtctgttaggctgggttcctgggatcggggcatgcaatattcccatagtataatagagaacctcctctaccacgtggtaggatggacagactggaatctggctttgaacccagaaggaggccccaattgggtgcgcaactttgttgacagccccatcattgtggatatcacaaaggacaccttctacaaacagcctatgttctatcatctggggcactttagcaagttcattccagagggttcccagagagtaggcttggttgcctcacagaagaatgatctggatgctgtggcactcatgcatcctgacgggagtgcagtggtggtagtactgaacaggtctagcaaagatgttcccttgactatcaaagacccagctgtgggctttctggaaaccatttcccctggatactctatccacacctatctctggagaagacag

SEQ ID NO: 1646 - protein, 536 aa, synthetic construct
  REGION 1..536: note = Variant of B-Glucocerebrosidase
MEFSSPSREECPKPLSRVSIMAGSLTGLLLLQAVSWASGARPCIPKSFGYSSVVCVCNATYCDSFDPPTFPALGTFSRYESTRSGRRMELSMGPIQANHTGTGLLLTLQPEQKFQKVKGFGGAMTDAAALNILALSPPAQNLLLKSYFSEEGIGYNIIRVPMASCDFSIRTYTYADTPDDFQLHNFSLPEEDTKLKIPLIHRALQLAQRPVSLLASPWTSPTWLKTNGAVNGKGSLKGQPGDIYHQTWARYFVKFLDAYAEHKLQFWAVTAENEPSAGLLSGYPFQCLGFTPEHQRDFIARDLGPTLANSTHHNVRLLMLDDQRLLLPHWAKVVLTDPEAAKYVHGIAVHWYLDFLAPAKATLGETHRLFPNTTLFASEACVGSKFWEQSVRLGSWDRGMQYSHSIIENLLYHVVGWTDWNLALNPEGGPNWVRNFVDSPIIVDITKDTFYKQPMFYHLGHFSKFIPEGSQRVGLVASQKNDLDAVALMHPDGSAVVVVLNRSSKDVPLTIKDPAVGFLETISPGYSIHTYLWRRQ

SEQ ID NO: 1647 - DNA, 1608 bp, synthetic construct
  misc_feature 1..1608: note = Variant of B-Glucocerebrosidase
  source 1..1608: mol_type = other DNA
atggagttttcttctcctagtagagaagaatgccccaagccactgagcagggtgagcatcatggctggatccctcacagggctgcttcttttgcaggcagtctcatgggcctctggagccaggccctgtattcccaagtcattcggctactcctcagtggtgtgtgtatgcaatgccacctattgtgacagttttgatcctccaactttccctgctctgggtaccttctcccggtatgagagcacaagaagtggaagacgcatggagctctcaatgggccctatacaggctaaccacactgggacaggtctgctgctgaccctccaacctgaacagaagtttcagaaagtcaagggatttggaggagccatgactgatgcagcagcactcaacatcttggccctgtctccaccagcccagaacctgctgttgaagtcctacttctcagaggaggggattggctacaacatcatccgggttcccatggctagctgtgacttctccattaggacctatacatacgctgacacccccgatgattttcagctccataatttcagtctccctgaagaagacaccaaactgaagatacctctgattcacagagccttgcaactggcacaaaggccagtgagcctcttggcttctccctggactagtcctacatggctgaagactaatggtgctgttaatgggaagggctccctgaaaggacagccaggtgacatatatcatcagacatgggcccgctactttgtgaaattccttgatgcctatgcagagcacaagctccaattctgggcagtcaccgcagaaaacgagccctcagctgggctgctgtctggctacccctttcagtgcttgggctttactcctgagcatcaacgggacttcattgcccgggatttggggccaacactggccaacagcacccaccacaatgtaagactcctcatgctggatgaccagaggctgctgctccctcattgggccaaggtggtgttgacagacccagaagctgccaaatatgttcatggcatcgctgtccactggtacctggattttttggcccctgccaaggctactctgggagagacccacagactcttccccaataccatgctgtttgcatcagaagcctgcgtggggagcaaattctgggagcagtctgttaggctgggttcctgggatcggggcatgcaatattcccatagtataatagagaacctcctctaccacgtggtaggatggacagactggaatctggctttgaacccagaaggaggccccaattgggtgcgcaactttgttgacagccccatcattgtggatatcacaaaggacaccttctacaaacagcctatgttctatcatctggggcactttagcaagttcattccagagggttcccagagagtaggcttggttgcctcacagaagaatgatctggatgctgtggcactcatgcatcctgacgggagtgcagtggtggtagtactgaacaggtctagcaaagatgttcccttgactatcaaagacccagctgtgggctttctggaaaccatttcccctggatactctatccacacctatctctggagaagacag

SEQ ID NO: 1648 - protein, 536 aa, synthetic construct
  REGION 1..536: note = Variant of B-Glucocerebrosidase
MEFSSPSREECPKPLSRVSIMAGSLTGLLLLQAVSWASGARPCIPKSFGYSSVVCVCNATYCDSFDPPTFPALGTFSRYESTRSGRRMELSMGPIQANHTGTGLLLTLQPEQKFQKVKGFGGAMTDAAALNILALSPPAQNLLLKSYFSEEGIGYNIIRVPMASCDFSIRTYTYADTPDDFQLHNFSLPEEDTKLKIPLIHRALQLAQRPVSLLASPWTSPTWLKTNGAVNGKGSLKGQPGDIYHQTWARYFVKFLDAYAEHKLQFWAVTAENEPSAGLLSGYPFQCLGFTPEHQRDFIARDLGPTLANSTHHNVRLLMLDDQRLLLPHWAKVVLTDPEAAKYVHGIAVHWYLDFLAPAKATLGETHRLFPNTMLFASEACVGSKFWEQSVRLGSWDRGMQYSHSIIENLLYHVVGWTDWNLALNPEGGPNWVRNFVDSPIIVDITKDTFYKQPMFYHLGHFSKFIPEGSQRVGLVASQKNDLDAVALMHPDGSAVVVVLNRSSKDVPLTIKDPAVGFLETISPGYSIHTYLWRRQ